(19) United States
(12) Patent Application Publication
(10) Pub. No.: US 2023/0365980 A1
(43) Pub. Date: Nov. 16, 2023

(54) METHODS FOR IMPROVING CRISPR/CAS-MEDIATED GENOME-EDITING

(71) Applicant: Editas Medicine, Inc., Cambridge, MA (US)

(72) Inventor: Cecilia Cotta-Ramusino, Cambridge, MA (US)

(73) Assignee: Editas Medicine, Inc., Cambridge, MA (US)

(21) Appl. No.: 18/138,988

(22) Filed: Apr. 25, 2023

Related U.S. Application Data
(63) Continuation of application No. 15/524,672, filed on May 5, 2017, now Pat. No. 11,680,268.
(60) Provisional application No. 62/232,683, filed on Sep. 25, 2015.
(60) Provisional application No. 62/077,084, filed on Nov. 7, 2014.

(51) Int. Cl. C12N 15/64; C12N 15/10; C12N 9/12

(52) U.S. Cl. CPC C12N 15/64; C12N 15/102; C12N 9/1241; C12N 2310/20; C12N 2310/122

(57) ABSTRACT

This application provides improved methods of editing the genome of a target cell. Cas9 molecules can be used to create a break in a genomic region of interest. To increase the likelihood that the break is repaired by homology-directed repair (HDR), the cell can be contacted with an HDR-enhancer. The cell may be, e.g., a human cell, a non-human animal cell, a bacterial cell, or a plant cell.

### RELATED APPLICATIONS

[0001] This application is a continuation application of U.S. patent application Ser. No. 15/524,672 filed on May 5, 2017, which is a U.S. national stage application, filed under 35 U.S.C. § 371, of International Application No. PCT/US2015/059782, filed on Nov. 9, 2015, which claims the benefit of U.S. Provisional Patent Application No. 62/077,084, filed on Nov. 7, 2014, and of U.S. Provisional Patent Application No. 62/232,683, filed Sep. 25, 2015. The entire contents of each of the foregoing applications are expressly incorporated herein by reference.

### SEQUENCE LISTING

[0002] The instant application contains a Sequence Listing which has been submitted electronically in XML file format and is hereby incorporated by reference in its entirety. Said XMLcopy, created on May 18, 2023, is named 126454-00104_SL.xml and is 3,113,175 bytes in size.

### BACKGROUND

[0003] The CRISPR (Clustered Regularly Interspaced Short Palindromic Repeats)/Cas (CRISPR-associated) system evolved in bacteria and archaea as an adaptive immune system to defend against viral attack. Upon exposure to a virus, short segments of viral DNA are integrated into the CRISPR locus. RNA is transcribed from a portion of the CRISPR locus that includes the viral sequence. That RNA, which contains sequence complimentary to the viral genome, mediates targeting of a Cas9 protein to the sequence in the viral genome. The Cas9 protein cleaves and thereby silences the viral target.

[0004] Recently, the CRISPR/Cas system has been adapted for genome editing in eukaryotic cells. The introduction of site-specific double strand breaks (DSBs) enables target nucleic acid alteration. After the formation of a DNA double-stranded break (DSB), the major decision point affecting DNA repair pathway choice is whether or not the DNA ends are endo- and exonucleolytically processed in a process referred to as end resection. When no end resection takes places, the repair pathway engaged to repair the DSB is referred to as classical non-homologous end joining (C-NHEJ). The C-NHEJ repair pathway leads to either perfect repair of the DSBs, in which case the locus is restored without sequence alterations, or to the formation of small insertions and deletions.

[0005] In contrast, if the end resection machinery processes the DSB, a 3′ overhang is exposed, which engages in homology search. A not yet completely characterized class of pathways that can engage the repair of DSBs after resection is initiated is referred to as alternative non-homologous end joining (ALT-NHEJ). Examples of pathways that are categorized as ALT-NHEJ include blunt end-joining (blunt EJ) and microhomology mediated end joining (MMEJ) leading to deletions, as well as synthesis dependent micro homology mediated end joining (SD-MMEJ), leading to the formation of insertions.

[0006] When the end resection is extensive, the exposed 3′ overhang can undergo strand invasion of highly homologous sequences, followed by repair of the DSB by a homology-dependent recombination (HDR) pathway. The HDR pathway comprises homologous recombination (HR), single strand annealing (SSA), and a potential third, not yet fully characterized alternative-HR pathway (“alt-HR”).

[0007] While a cell could, in theory, repair breaks via any of a number of DNA damage repair pathways, in certain circumstances it is particularly useful to provide an environment more favorable for repair of the break by a HDR pathway. However, there remains a need to improve the efficiency of HDR-mediated modification in order to broaden the applicability of genome editing by the CRISPR/Cas system.

### SUMMARY

[0008] This disclosure provides systems and methods for editing a genome using a CRISPR/Cas system which enables target nucleic acid alteration by homology-directed repair (HDR) pathways. In HDR, a cell repairs a damaged region by using a homologous template. In normal cells, this template is often a sister chromatid. To encourage the cell to repair a break by HDR, one can provide an exogenous template nucleic acid that bears, for example, the “correct” sequence corresponding to a mutation. To even further increase the likelihood that the cell repairs the break using HDR, one can contact the cell with an HDR-enhancer. Some HDR-enhancers are agents that inhibit another DNA damage repair pathway, with the result that the cell becomes more likely to use a HDR pathway than the inhibited DNA damage repair pathway. Other HDR-enhancers directly stimulate a HDR pathway. In another embodiment, to encourage the cell to repair a break by HDR, one can optimize the DNA cut. For example, dual gRNAs can be designed to be oriented on a target nucleic acid such that the protospacer adjacent motifs (PAMs) are facing out, and cutting with a Cas9 nickase molecule will result in 5′ overhangs.

[0009] In one aspect, described herein is a Cas9 system comprising a gRNA molecule capable of targeting a Cas9 molecule to a target nucleic acid in a cell, a Cas9 molecule, and an HDR-enhancer molecule. In one embodiment, described herein is a Cas9 system comprising an HDR-enhancer molecule and a gRNA molecule. In another embodiment, described herein is a Cas9 system comprising an HDR-enhancer molecule and a Cas9 molecule. In one embodiment, the HDR-enhancer molecule is not an inhibitor of DNA-PK. In one embodiment, the HDR-enhancer molecule is not an inhibitor of Ligase IV.

[0010] In one embodiment, the HDR-enhancer molecule is an HDR-enhancing gRNA. In another embodiment, the HDR-enhancer molecule is an siRNA. In another embodiment, the HDR-enhancer molecule is an antibody. In another embodiment, the HDR-enhancer molecule is an miRNA. In another embodiment, the HDR-enhancer molecule is an antiMiR. In another embodiment, the HDR-enhancer molecule is a small molecule. In another embodiment, the HDR-enhancer molecule is a protein. In one embodiment, the protein is a dominant negative protein.

[0011] In one embodiment, the HDR-enhancer is a down-regulator of HR, a down-regulator of canonical NHEJ, a down-regulator of alt-NHEJ, a down-regulator of an antirecombinant factor, a down-regulator of SSA, a down-regulator of SSBR, a down-regulator of MMR, a chromatin modification agent, a cell cycle arrest compound, an agent capable of promoting resection at a double strand break, a down-regulator of SD-MMEJ, or a down-regulator of blunt EJ.

[0012] In one embodiment, the Cas9 system further comprises a template nucleic acid. In one embodiment, the template nucleic acid is an endogenous nucleic acid in a cell.

[0013] In one embodiment, the Cas9 system further comprises a second gRNA suitable for targeting a Cas9 molecule to the target nucleic acid, or a second nucleic acid encoding a second gRNA suitable for targeting a Cas9 molecule to the target nucleic acid. In one embodiment, the Cas9 system further comprises a second gRNA or a second nucleic acid encoding a second gRNA. In one embodiment, the gRNA is configured to guide the Cas9 molecule to produce a first break, and the second gRNA is configured to guide a second Cas9 molecule to produce a second break. In another embodiment, the gRNA and the second gRNA are configured to position the first break and the second break within 65 nucleotides of one another; at least 25 nucleotides apart; or within 25-65 nucleotides of one another.

[0014] In another aspect, described herein is a Cas9 system comprising a Cas9 nickase molecule, a gRNA molecule, wherein the gRNA molecule is capable of targeting the Cas9 nickase molecule to a target nucleic acid, and a second gRNA molecule, wherein the second gRNA molecule is capable of targeting the Cas9 nickase molecule to the target nucleic acid, wherein the gRNA molecule and the second gRNA molecule are designed to be oriented on the target nucleic acid such that protospacer adjacent motifs (PAMs) are facing out, wherein the gRNA molecule will position the Cas9 nickase molecule to make a single-stranded break in the target nucleic acid which results a 5′ overhang in the target nucleic acid. In one embodiment, the Cas9 nickase molecule has a D10A mutation. In another embodiment, the gRNA molecule will position the Cas9 nickase molecule to make a single-stranded break in the target nucleic acid which results in a 3′ overhang in the target nucleic acid. In another aspect, described herein is a Cas9 system comprising a Cas9 nickase molecule, a gRNA molecule, wherein the gRNA molecule is capable of targeting the Cas9 nickase molecule to a target nucleic acid, and a second gRNA molecule, wherein the second gRNA molecule is capable of targeting the Cas9 nickase molecule to the target nucleic acid, wherein the gRNA molecule and the second gRNA molecule are designed to be oriented on the target nucleic acid such that protospacer adjacent motifs (PAMs) are facing out, wherein the gRNA molecule will position the Cas9 nickase molecule to make a single-stranded break in the target nucleic acid which results a 3′ overhang in the target nucleic acid. In one embodiment, the Cas9 nickase molecule has an N863A mutation.

[0015] In one embodiment, the Cas9 system comprises a gRNA. In one embodiment, the Cas9 system comprises a nucleic acid encoding a gRNA. In one embodiment, the Cas9 system comprises both a gRNA and a nucleic acid encoding a gRNA.

[0016] In on embodiment, the Cas9 system comprises a second gRNA. In one embodiment, the Cas9 system comprises a second nucleic acid encoding a second gRNA. In another embodiment, the Cas9 system comprises both a second gRNA and a nucleic acid encoding a second gRNA.

[0017] In one embodiment, the Cas9 system comprises a Cas9 polypeptide. In one embodiment, the Cas9 system comprises a nucleic acid encoding a Cas9 polypeptide. In one embodiment, the Cas9 system comprises both a Cas9 polypeptide and a nucleic acid encoding a Cas9 polypeptide.

[0018] In one embodiment, the Cas9 system comprises an HDR-enhancer. In one embodiment, the Cas9 system comprises a nucleic acid encoding an HDR-enhancer. In one embodiment, the Cas9 system comprises both an HDR-enhancer and a nucleic acid encoding an HDR-enhancer.

[0019] In one embodiment, the Cas9 system comprises a gRNA, a Cas9 polypeptide, and an HDR-enhancer. In another embodiment, the Cas9 system comprises a nucleic acid encoding a gRNA, a nucleic acid encoding a Cas9 polypeptide, and a nucleic acid encoding an HDR-enhancer. In another embodiment, the Cas9 system comprises a nucleic acid encoding a gRNA, a Cas9 polypeptide, and an HDR-enhancer. In another embodiment, the Cas9 system comprises a nucleic acid encoding a gRNA, a nucleic acid encoding a Cas9 polypeptide, and an HDR-enhancer. In another embodiment, the Cas9 system comprises a gRNA, a Cas9 polypeptide, and a nucleic acid encoding an HDR-enhancer. In another embodiment, the composition comprises a gRNA, a nucleic acid encoding a Cas9 polypeptide, and a nucleic acid encoding an HDR-enhancer. In one embodiment, the Cas9 system further comprises a template nucleic acid.

[0020] In one embodiment, the HDR-enhancer molecule is an antibody, an miRNA, an siRNA, an antiMiR, a small molecule, or an HDR-enhancing gRNA. In one embodiment, the HDR-enhancer molecule is an miRNA. In one embodiment, the HDR-enhancer molecule is an siRNA. In one embodiment, the HDR-enhancer molecule is an antiMiR. In one embodiment, the HDR-enhancer molecule is an HDR-enhancing gRNA. In one embodiment, the HDR-enhancer molecule is a small molecule. In one embodiment, the HDR-enhancer molecule is an antibody. In one embodiment, the antibody is an intrabody. In one embodiment, the antibody comprises a nuclear localization sequence. In one embodiment, the siRNA is an siRNA comprising a modified nucleotide. In one embodiment, the siRNA is directed against an mRNA that encodes a target.

[0021] In one embodiment, the HDR-enhancer molecule is not an inhibitor of RAD51. In one embodiment, the HDR-enhancer molecule is not an inhibitor of BRCA2. In one embodiment, the HDR-enhancer molecule is not an inhibitor of PALB2. In one embodiment, the HDR-enhancer molecule is not an inhibitor of SHFM1. In one embodiment, the HDR-enhancer molecule is not an inhibitor of Ku70. In one embodiment, the HDR-enhancer molecule is not an inhibitor of Ku80. In one embodiment, the HDR-enhancer molecule is not an inhibitor of DNA-PKcs. In one embodiment, the HDR-enhancer molecule is not an inhibitor of XRCC4. In one embodiment, the HDR-enhancer molecule is not an inhibitor of XLF. In one embodiment, the HDR-enhancer molecule is not an inhibitor of Ligase IV. In one embodiment, the HDR-enhancer molecule is not an inhibitor of PNK. In one embodiment, the HDR-enhancer molecule is not an inhibitor of Artemis. In one embodiment, the HDR-enhancer molecule is not PARP1. In one embodiment, the HDR-enhancer molecule is not PARP2. In one embodiment, the HDR-enhancer molecule is not XRCC1. In one embodiment, the HDR-enhancer molecule is not Ligase III. In one embodiment, the HDR-enhancer molecule is not Histone H1.

[0022] In one embodiment, the HDR-enhancer molecule is a down-regulator of anti-HR. In one embodiment, the down-regulator of anti-HR is an inhibitor of a protein which inhibits HR or promotes repression of HR. In one embodiment, the down-regulator of anti-HR is capable of promoting SSA or alt-HR. In one embodiment, the down-regulator of anti-HR is capable of promoting SSA or alt-HR as compared to the level of SSA or alt-HR in the absence of the down-regulator of anti-HR.

[0023] In one embodiment, the HDR-enhancer molecule is an inhibitor of a component of Table VI.4 or Table VI.1(D). In one embodiment, the HDR-enhancer molecule is an antibody. In one embodiment, the antibody is an intrabody. In one embodiment, the HDR-enhancer molecule is an siRNA. In one embodiment, the HDR-enhancer molecule is an HDR-enhancing gRNA.

[0024] In one embodiment, the antibody, the siRNA, or the HDR-enhancing gRNA is directed against a component from Table VI.4 or Table VI.1(D). In one embodiment, the HDR-enhancer molecule is an agent of Table VI.5. In one embodiment, the HDR-enhancer inhibits Fbh1, PARI, RTEL, Rap80, miR-155, miR-545, miR-107, miR-1255, miR-148, or miR-193. In one embodiment, the HDR-enhancer that inhibits Fbh1 is an siRNA. In one embodiment, the HDR enhancer that inhibits PARI is an siRNA. In one embodiment, the HDR-enhancer that inhibits RTEL is an siRNA. In one embodiment, the HDR-enhancer that inhibits RAP80 is an siRNA. In one embodiment, the HDR-enhancer that inhibits miR-155, miR-545, miR-107, miR-1255, miR-148, or miR-193 is an anti-miR. In another embodiment, the HDR-enhancer is an HDR-enhancing gRNA molecule.

[0025] In one embodiment, the HDR-enhancer molecule is a down-regulator of SSA. In one embodiment, the down-regulator of SSA is an inhibitor of a protein, wherein the protein promotes SSA. In one embodiment, the down-regulator of SSA is capable of promoting HR or alt-HR. In one embodiment, the down-regulator of SSA is capable of promoting HR or alt-HR as compared to the level of HR or alt-HR that would occur in the absence of the down-regulator of SSA.

[0026] In one embodiment, the HDR-enhancer molecule is an inhibitor of a component of Table VI.1(E) or VI.11. In one embodiment, the HDR-enhancer molecule is an antibody, an siRNA, a small molecule, or an HDR-enhancing gRNA. In one embodiment, the antibody is an intrabody.

[0027] In one embodiment, the antibody, the siRNA, or the HDR-enhancing gRNA is directed against a component from Table VI.1(E) or VI.11. In one embodiment, the HDR-enhancer molecule is an agent of Table VI.12.

[0028] In one embodiment, the HDR-enhancer molecule inhibits Rad52, XPF, or ERCC1. In one embodiment, the HDR-enhancer molecule that inhibits Rad52, XPF or ERCC1 is an siRNA or an HDR-enhancing gRNA molecule.

[0029] In one embodiment, the HDR-enhancer molecule is a chromatin modification agent. In one embodiment, the chromatin modification agent is an agent that inhibits a chromatin modification protein that promotes a DNA repair pathway. In one embodiment, the chromatin modification agent is capable of promoting HDR. In one embodiment, HDR is increased as compared to the level of HDR that would occur in the absence of the chromatin modification agent.

[0030] In one embodiment, the chromatin modification agent is not an HDAC. In another embodiment, the HDR-enhancer molecule is an HDAC. In one embodiment, the HDAC is HDAC1 or HDAC2. In one embodiment, the HDR-enhancer that inhibits the HDAC is TCA.

[0031] In one embodiment, the HDR-enhancer molecule is present in an amount sufficient to alter chromatin at a target nucleic acid. In one embodiment, the HDR-enhancer molecule is a modulator of a component of Table VI.1(I). In one embodiment, the modulator is an inhibitor. In one embodiment, the HDR-enhancer molecule is an antibody, an siRNA, or a HDR-enhancing gRNA. In one embodiment, the antibody is an intrabody. In one embodiment, the HDR-enhancer molecule is directed against a component from Table VI.1(I). In one embodiment, the HDR-enhancer molecule is an agent of Table VII. In one embodiment, the HDR-enhancer inhibits EZH2. In one embodiment, the HDR-enhancer that inhibits EZH2 is EPZ-6438. In one embodiment, the HDR-enhancer is directed against a component from Table VI.1(I). In one embodiment, the HDR-enhancer is an agent of Table VII. In one embodiment, the HDR-enhancer inhibits Setd2.

[0032] In one embodiment, the HDR-enhancer molecule is a down-regulator of SSBR. In one embodiment, the down-regulator of SSBR is an inhibitor of a protein, wherein the protein promotes SSBR. In one embodiment, HDR is increased as compared to the level of HDR that would occur in the absence of the down-regulator of SSBR.

[0033] In one embodiment, the HDR-enhancer molecule is an antibody, an siRNA, a small molecule, or an HDR-enhancing gRNA. In one embodiment, the antibody is an intrabody. In one embodiment, the HDR-enhancer molecule is an inhibitor of a component of Table VI.13 or VI.1(F). In one embodiment, the antibody, the siRNA, or the HDR-enhancing gRNA is directed against a component from Table VI.13 or VI.1(F). In one embodiment, the HDR-enhancer molecule is an agent of Table VI.14. In one embodiment, the HDR-enhancer inhibits a PARP or XRCC1. In one embodiment, the HDR-enhancer that inhibits a PARP is selected from the group consisting of AZD2281, KU-0059436, and BMN673. In one embodiment, the HDR-enhancer that inhibits XRCC1 is an siRNA.

[0034] In one embodiment, the HDR-enhancer molecule is an agent capable of promoting resection at a single or double strand break. In one embodiment, the agent capable of promoting resection is increases HDR as compared to the level of HDR that would occur in the absence of the agent capable of promoting resection. In one embodiment, the agent that promotes resection at a single or double strand break is an endonuclease or an exonuclease. In one embodiment, the agent that promotes resection is an inhibitor of an anti-resection protein.

[0035] In one embodiment, the HDR-enhancer molecule is an antibody, an siRNA, a small molecule, a polypeptide, or an HDR-enhancing gRNA. In one embodiment, the antibody is an intrabody. In one embodiment, the anti-resection protein is a protein of Table VI.1(A). In one embodiment, the antibody, the siRNA, or the HDR-enhancing gRNA is directed against a component from Table VI.1(A). In one embodiment, the inhibitor of an anti-resection protein is an inhibitor of 53BP1, Rif-1, or PTIP. In one embodiment, the inhibitor of an anti-resection protein is a dominant negative 53BP1 protein.

[0036] In one embodiment, the HDR-enhancer molecule is a down-regulator of SD-MMEJ. In one embodiment, the HDR-enhancer molecule is an antibody, an siRNA, or a an HDR-enhancing gRNA. In one embodiment, the antibody is an intrabody. In one embodiment, the HDR-enhancer molecule is an inhibitor of Pol Theta. In one embodiment, the HDR-enhancer molecule is a CDK1 inhibitor. In one embodiment, the HDR-enhancer molecule is an agent of Table VIII. In one embodiment, the antibody, the siRNA, or the HDR-enhancing gRNA is directed against a component from Table VIII.

[0037] In one embodiment, the HDR-enhancer molecule is an agent that promotes cell cycle arrest in G2 phase, wherein the HDR-enhancer molecule is not a CDK1 inhibitor. In one embodiment, the HDR-enhancer molecule is present in an amount sufficient to cause a cell to arrest in G2 phase.

[0038] In one embodiment, the Cas9 system further comprises an additional one or more HDR-enhancer molecules. In one embodiment, the Cas9 system further comprises an additional one HDR enhancer molecule. In one embodiment, the Cas9 system further comprises an additional two HDR-enhancer molecules.

[0039] In one embodiment, the HDR-enhancer molecule and the additional one or more HDR-enhancer molecules are capable of up-regulating the same pathway. In one embodiment, the HDR-enhancer molecule and the additional one or more HDR-enhancer molecules are capable of down-regulating the same pathway.

[0040] In one embodiment, the HDR-enhancer molecule is a down-regulator of C-NHEJ. In one embodiment, the down-regulator of C-NHEJ is capable of increasing levels of HDR as compared to the level of HDR that would occur in the absence of the down-regulator of C-NHEJ. In one embodiment, the HDR-enhancer molecule is an antibody, an siRNA, a small molecule, or an HDR-enhancing gRNA.

[0041] In one embodiment, the HDR-enhancer molecule is an inhibitor of a component of Table VI.7 or VI.1(B). In one embodiment, the antibody, the siRNA, or the HDR-enhancing gRNA is directed against a component from Table VI.7 or VI.1(B). In one embodiment, the HDR-enhancer molecule is an agent of Table VI.8. In one embodiment, the HDR-enhancer molecule is an inhibitor of DNA Pk or an inhibitor of 53BP1. In one embodiment, the inhibitor of DNA Pk is selected from the group consisting of NU7441, KU-0060648, CC115, and NK314. In one embodiment, the inhibitor of 53BP1 is an siRNA targeting 53BP1. In one embodiment, the inhibitor of an anti-resection protein is a dominant negative 53BP1 protein.

[0042] In one embodiment, the HDR-enhancer molecule is a down-regulator of blunt EJ. In one embodiment, the HDR-enhancer molecule is a down-regulator of SD-MMEJ. In one embodiment, the down-regulator of blunt EJ or MMEJ is capable of increasing the level of HDR as compared to the level of HDR that would occur in the absence of the down-regulator of blunt EJ or SD-MMEJ. In one embodiment, the HDR-enhancer molecule is an antibody, an siRNA, a small molecule, or an HDR-enhancing gRNA.

[0043] In one embodiment, the HDR-enhancer molecule is an inhibitor of a component of Table VI.9 or Table VI.1(J). In one embodiment, the antibody, the siRNA, or the HDR-enhancing gRNA is directed against a component from Table VI.9 or Table VI.1(J). In one embodiment, the HDR-enhancer molecule is an agent of Table VI.10.

[0044] In one embodiment, the HDR-enhancer molecule is an up-regulator of HDR. In one embodiment, the up-regulator of HDR is a protein selected from the group consisting of: MRE11, RAD50, NBS1, BRCA2, and BRCA1, or a polypeptide comprising at least 60, 70, 80, 90, 95, 98, 99 or 100% homology with, or which differing by no more than 50, 40, 30, 20, 15, 10, 5, 4, 3, 2, or 1, amino acid residues from a naturally occurring MRE11, RAD50, NBS1, BRCA2, or BRCA1. In one embodiment, the up-regulator of HDR is a protein of Table VI.2 or a protein of Table VI.1(C). In one embodiment, the up-regulator of HDR is a polypeptide comprising at least 60, 70, 80, 90, 95, 98, 99 or 100% homology with, or which differing by no more than 50, 40, 30, 20, 15, 10, 5, 4, 3, 2, or 1, amino acid residues from, a protein of Table VI.2 or Table VI.1(C). In another embodiment, the up-regulator of HDR is a dominant negative CtIP. A dominant negative CtIP promotes resection in G1 phase.

[0045] In another embodiment, the HDR-enhancer molecule is an up-regulator of SSA. In one embodiment, the up-regulator of SSA is a protein selected from the group consisting of Rad52 and ERCC1. In one embodiment, the up-regulator of SSA is a polypeptide comprising at least 60, 70, 80, 90, 95, 98, 99 or 100% homology with, or which differing by no more than 50, 40, 30, 20, 15, 10, 5, 4, 3, 2, or 1, amino acid residues from, Rad52 or ERCC1. In one embodiment, the HDR-enhancer molecule is a down-regulator of one HDR pathway. In one embodiment, the down-regulator one HDR Pathway is an inhibitor of a protein, wherein the protein promotes other HDR pathways. In one embodiment, the down-regulator of HDR is capable of increasing alt-HR and/or SSA as compared to the level of alt-HR and/or SSA in the absence of the down-regulator of HDR. In one embodiment, the down-regulator of HDR is capable of increasing alt-HR and/or HR as compared to the level of alt-HR and/or HR in the absence of the down-regulator of HDR. In one embodiment, the down-regulator of HDR is capable of increasing HR and/or SSA as compared to the level of HR and/or SSA in the absence of the down-regulator of −HDR.

[0046] In one embodiment, the HDR-enhancer molecule is an inhibitor of a component of Table VI.2 or VI.1(C). In one embodiment, the HDR-enhancer molecule is an antibody, an siRNA, a small molecule, or an HDR-enhancing gRNA. In one embodiment, the antibody is an intrabody. In one embodiment, the antibody, the siRNA, the small molecule, or the HDR-enhancing gRNA is directed against a component from Table VI.2 or VI.1(C). In one embodiment, the HDR-enhancer molecule is an agent of Table VI.3.

[0047] In one embodiment, the HDR-enhancer inhibits BRCA2, BRCA1, or RAD51. In one embodiment, the HDR-enhancer molecule is an antibody directed against a BRCA2, BRCA1, or RAD51. In one embodiment, the antibody is an intrabody. In one embodiment, the HDR-enhancer molecule is an siRNA directed against BRCA2, BRCA1, or RAD51. In one embodiment, the HDR-enhancer molecule is selected from: B02, A03, AI-10, RI-1, RI-2, and IBR2.

[0048] In one embodiment, the HDR-enhancer molecule is a cell cycle arrest agent. In one embodiment, the Cas9 system of further comprises a cell cycle arrest agent. In one embodiment, the cell cycle arrest agent is capable of arresting cells in G2 phase. In one embodiment, the cell cycle arrest agent is a Cdk1 inhibitor. In one embodiment, the Cdk1 inhibitor is an siRNA or an antibody. In one embodiment, the cell cycle arrest agent is not a Cdk1 inhibitor.

[0049] In one embodiment, the gRNA is configured to position a Cas9 molecule-mediated cleavage event at a preselected position relative to a landmark on a target nucleic acid, wherein the target nucleic acid is an endogenous nucleic acid. In one embodiment, the landmark is a preselected site in the target nucleic acid. In another embodiment, the preselected position, or the landmark, or both the preselected position and the landmark, are present on the endogenous nucleic acid. In one embodiment, the endogenous nucleic acid is a chromosomal nucleic acid or an organellar nucleic acid. In one embodiment, the endogenous nucleic acid is not a heterologous reporter gene.

[0050] In one embodiment, the gRNA comprises at least one domain of a preselected length. In another embodiment, the at least one domain is a targeting domain.

[0051] In one embodiment, the landmark is a target position, wherein the target position is the nucleotide or one of the nucleotides to be corrected or altered. In one embodiment, the landmark is the 5′ end of a target position, wherein the target position is a nucleotide or one of the nucleotides to be corrected or altered. In one embodiment, the landmark is the 3′ end of a target position, wherein the target position is the nucleotide or one of the nucleotides to be corrected or altered. In one embodiment, the landmark is within a target position, wherein the target position is the nucleotide or one of the nucleotides to be corrected or altered.

[0052] In one embodiment, the Cas9 system further comprises a template nucleic acid comprising a 5′ homology arm, a replacement sequence, and a 3′ homology arm, wherein the landmark is a position on the target nucleic acid that corresponds to the 5′ end of the replacement sequence.

[0053] In one embodiment, the Cas9 system further comprises a template nucleic acid comprising a 5′ homology arm, a replacement sequence, and a 3′ homology arm, wherein the landmark is a position on the target nucleic acid that corresponds to the 3′ end of the replacement sequence.

[0054] In one embodiment, the Cas9 system further comprises a template nucleic acid comprising a 5′ homology arm, a replacement sequence, and a 3′ homology arm, wherein the landmark is a position on the target nucleic acid within the replacement sequence.

[0055] In one embodiment, the Cas9 system further comprises a template nucleic acid comprising a 5′ homology arm, a replacement sequence, and a 3′ homology arm, wherein the landmark is a position on the target nucleic acid within the 5′ homology arm.

[0056] In one embodiment, the Cas9 system further comprises a template nucleic acid comprising a 5′ homology arm, a replacement sequence, and a 3′ homology arm, wherein the landmark is a position on the target nucleic acid within the 3′ homology arm.

[0057] In one embodiment, the Cas9 system further comprises a template nucleic acid comprising a 5′ homology arm, a replacement sequence, and a 3′ homology arm, wherein the landmark is a position on the target nucleic acid that corresponds to the 5′ end of the template nucleic acid.

[0058] In one embodiment, the Cas9 system further comprises a template nucleic acid comprising a 5′ homology arm, a replacement sequence, and a 3′ homology arm, wherein the landmark is a position on the target nucleic acid that corresponds to the 3′ end of the template nucleic acid.

[0059] In one embodiment, the landmark is an intron/exon boundary. In one embodiment, the intron/exon boundary is the intron/exon boundary nearest a target position, wherein the target position is a nucleotide or one of the nucleotides to be corrected or altered. In one embodiment, the intron/exon boundary is within 50, 100, 200, or 500 nucleotides of the target position, wherein the target position is a nucleotide or one of the nucleotides to be corrected or altered.

[0060] In one embodiment, the landmark is in an intron. In one embodiment, the intron is the intron nearest to a target position, wherein the target position is a nucleotide or one of the nucleotides to be corrected or altered. In one embodiment, the intron is the nearest intron upstream of a target position, wherein the target position is a nucleotide or one of the nucleotides to be corrected or altered. In one embodiment, the intron is the nearest intron downstream of a target position, wherein the target position is a nucleotide or one of the nucleotides to be corrected or altered. In one embodiment, the intron is an intron within 50, 100, 200, or 500 nucleotides of the target position.

[0061] In one embodiment, the landmark is in an exon. In one embodiment, the exon is the exon nearest to a target position, wherein the target position is a nucleotide or one of the nucleotides to be corrected or altered. In one embodiment, the exon is the nearest exon upstream of a target position, wherein the target position is a nucleotide or one of the nucleotides to be corrected or altered. In one embodiment, the exon is the nearest exon downstream of a target position, wherein the target position is a nucleotide or one of the nucleotides to be corrected or altered. In one embodiment, the exon is an exon within 50, 100, 200, or 500 nucleotides of the target position.

[0062] In one embodiment, the landmark is the 5′ end of a coding region or the 3′ end of a coding region. In one embodiment, the coding region is the coding region nearest to a target position. In one embodiment, the coding region is the coding region within a target position lies. In one embodiment, the coding region is the nearest coding region downstream of a target position. In one embodiment, the coding region is the nearest coding region upstream of a target position. In one embodiment, the coding region is a coding region within 50, 100, 200, or 500 nucleotides of a target position. In one embodiment, the landmark is within a coding region. In one embodiment, the coding region is the coding region nearest to a target position. In one embodiment, the coding region is the coding region within which a target position lies. In one embodiment, the coding region is the nearest coding region upstream of a target position, or the nearest coding region downstream of a target position. In one embodiment, the coding region is a coding region within 50, 100, 200, or 500 nucleotides of a target position.

[0063] In one embodiment, the landmark is the 5′ end of a transcribed region. In one embodiment, the transcribed region is a transcribed region nearest to a target position, a transcribed region within which a target position lies, a nearest transcribed region upstream of a target position, a nearest transcribed region downstream of a target position, or a transcribed region within 50, 100, 200, or 500 nucleotides of a target position.

[0064] In one embodiment, the landmark is the 3′ end of a transcribed region. In one embodiment, the transcribed region is a transcribed region nearest to a target position, a transcribed region within which a target position lies, a nearest transcribed region upstream of a target position, a nearest transcribed region downstream of a target position, or a transcribed region within 50, 100, 200, or 500 nucleotides of a target position.

[0065] In one embodiment, the landmark is within a transcribed region. In one embodiment, the transcribed region is a transcribed region nearest to a target position, a transcribed region within which a target position lies, a nearest transcribed region upstream of a target position, a nearest transcribed region downstream of a target position, or a transcribed region within 50, 100, 200, or 500 nucleotides of a target position.

[0066] In one embodiment, the landmark is the 5′ end of a repeated element. In one embodiment, the landmark is the 3′ end of a repeated element. In one embodiment, the landmark is within a repeated element. In one embodiment, the repeated element is a repeated element nearest to a target position, a repeated element within which a target position lies, a nearest repeated element upstream of a target position, a nearest repeated element downstream of a target position, or a repeated element within 50, 100, 200, or 500 nucleotides of a target position. In one embodiment, the preselected position is at the landmark, not at the landmark, within 50, 100, 150, or 200 nucleotides of the landmark, at least 10, 20, 30, 40, or 50 nucleotides away from the landmark, or 10-200, 20-200, 30-200, 40-200, 50-200, 10-150, 10-100, or 10-50 nucleotides away from the landmark.

[0067] In one embodiment, the landmark is a target position, wherein the target position is a nucleotide or one of the nucleotides to be corrected or altered, and the preselected position is at the landmark, away from the landmark, within 50, 100, 150, or 200 nucleotides of the landmark, or 10-200, 20-200, 30-200, 40-200, 50-200, 10-150, 10-100, or 10-50 nucleotides away from the landmark.

[0068] In one embodiment, the landmark is a repetitive sequence, and wherein the preselected position is away from the landmark; at least 50, 100, 150, or 200 nucleotides away from the landmark; or 10-200, 20-200, 30-200, 40-200, 50-200, 10-150, 10-100, or 10-50 nucleotides away from the landmark.

[0069] In one embodiment, the targeting domain is 12-30 nucleotides in length. In one embodiment, the targeting domain is at least 21 nucleotides in length.

[0070] In one embodiment, the at least one domain of a preselected length is a domain encompassing a proximal domain and a tail domain which, taken together, are at least 15, 18, 20, 25, 30, 31, 35, 40, 45, 49, 50, or 53 nucleotides in length.

[0071] In one embodiment, the 5′ homology arm has a length of at least 50, 100, 250, 500, 750, 1000, 2000, 3000, 4000, or 5000 nucleotides. In one embodiment, the 5′ homology arm has a length of no more than 50, 100, 250, 500, 750, 1000, 2000, 3000, 4000, or 5000 nucleotides. In one embodiment, the 5′ homology arm has a length of between 50-100, 100-250, 250-500, 500-750, 750-1000, 1000-2000, 2000-3000, 3000-4000, or 4000-5000 nucleotides.

[0072] In one embodiment, the 5′ homology arm has a length of at least 50, 100, 250, 500, 750, 1000, 2000, 3000, 4000, or 5000 nucleotides. In one embodiment, the 5′ homology arm has a length of no more than 50, 100, 250, 500, 750, 1000, 2000, 3000, 4000, or 5000 nucleotides. In one embodiment, the 5′ homology arm has a length of between 50-100, 100-250, 250-500, 500-750, 750-1000, 1000-2000, 2000-3000, 3000-4000, or 4000-5000 nucleotides.

[0073] In one embodiment, the 5′ homology arm has a 5′ end and a 3′ end and: the 5′ end is at least 50, 100, 250, 500, 750, 1000, 2000, 3000, 4000, or 5000 nucleotides from a target position, the 5′ end is no more than 50, 100, 250, 500, 750, 1000, 2000, 3000, 4000, or 5000 nucleotides from a target position, the 5′ end is between 50-100, 100-250, 250-500, 500-750, 750-1000, 1000-2000, 2000-3000, 3000-4000, or 4000-5000 nucleotides from a target position, the 3′ end is at least 50, 100, 250, 500, 750, 1000, 2000, 3000, 4000, or 5000 nucleotides from a target position, the 3′ end is no more than 50, 100, 250, 500, 750, 1000, 2000, 3000, 4000, or 5000 nucleotides from a target position, or the 3′ end is between 50-100, 100-250, 250-500, 500-750, 750-1000, 1000-2000, 2000-3000, 3000-4000, or 4000-5000 nucleotides from a target position.

[0074] In one embodiment, the 3′ homology arm has a 5′ end and a 3′ end and: the 5′ end is at least 50, 100, 250, 500, 750, 1000, 2000, 3000, 4000, or 5000 nucleotides from a target position, the 5′ end is no more than 50, 100, 250, 500, 750, 1000, 2000, 3000, 4000, or 5000 nucleotides from a target position, the 5′ end is between 50-100, 100-250, 250-500, 500-750, 750-1000, 1000-2000, 2000-3000, 3000-4000, or 4000-5000 nucleotides from a target position, the 3′ end is at least 50, 100, 250, 500, 750, 1000, 2000, 3000, 4000, or 5000 nucleotides from a target position, the 3′ end is no more than 50, 100, 250, 500, 750, 1000, 2000, 3000, 4000, or 5000 nucleotides from a target position, or the 3′ end is between 50-100, 100-250, 250-500, 500-750, 750-1000, 1000-2000, 2000-3000, 3000-4000, or 4000-5000 nucleotides from a target position.

[0075] In one embodiment, the replacement sequence has a length of: at least 1, 2, 3, 5, 10, 20, 50, 100, 200, 500, 1000, 2000, 300, 4000, or 5000 nucleotides, no more than 2, 3, 5, 10, 20, 50, 100, 200, 500, 1000, 2000, 300, 4000, or 5000 nucleotides, or between 1-3, 1-5, 1-10 10-20, 20-50, 50-100, 100-200, 200-500, 500-1000, 1000-2000, 2000-3000, 3000-4000, or 4000-5000 nucleotides.

[0076] In one embodiment, the gRNA is chimeric. In one embodiment, the gRNA is modular. In one embodiment, the gRNA comprises a targeting domain, a first complementary domain, a second complementary domain, and a proximal domain.

[0077] In one embodiment, the template nucleic acid comprises a 5′ homology arm, a replacement sequence, and a 3′ homology arm. In one embodiment, the replacement sequence corresponds to a second endogenous nucleic acid. In one embodiment, the second endogenous nucleic acid is a second chromosomal nucleic acid or a second organellar nucleic acid. In another embodiment, the second endogenous nucleic acid is not a heterologous reporter gene.

[0078] In one embodiment, the template nucleic acid comprises, or comprises a part of, a circular nucleic acid. In one embodiment, the circular nucleic acid is a plasmid. In one embodiment, the template nucleic acid is a linear nucleic acid. In one embodiment, the template nucleic acid comprises a double stranded sequence. In one embodiment, the template nucleic acid comprises a single strand oligonucleotide. In one embodiment, the template nucleic acid comprises a single-stranded DNA hybrid. In one embodiment, the template nucleic acid is present in an AAV or an ILDV. In one embodiment, the template nucleic acid is an endogenous nucleic acid sequence.

[0079] In one embodiment, the template nucleic acid comprises about 150-200 nucleotides of homology with a target nucleic acid. In one embodiment, the 150-200 nucleotides of homology correspond to one side of a break in the target nucleic acid. In one embodiment, the 150-200 nucleotides of homology correspond to two sides of a break in the target nucleic acid. In one embodiment, the template nucleic acid comprises about 500-2000 nucleotides of homology with a target nucleic acid. In one embodiment, the 500-2000 nucleotides of homology correspond to one side of a break in the target nucleic acid. In one embodiment, the 500-2000 nucleotides of homology correspond to two sides of a break in the target nucleic acid.

[0080] In one embodiment, the template nucleic acid has homology to the target nucleic acid on one side of the break. In one embodiment, the template nucleic acid has homology to the target nucleic acid on two sides of the break. In one embodiment, the template nucleic acid comprises a human sequence. In one embodiment, the human sequence is a wild-type human sequence. In one embodiment, the wild-type human sequence corresponds to a mutation at the target nucleic acid. In one embodiment, the template nucleic acid lacks a repeated element. In one embodiment, the repeated element is an Alu sequence or a LINE sequence. In one embodiment, the template nucleic acid comprises a modified nucleic acid.

[0081] In one embodiment, the Cas9 molecule is a protein selected from Table 111.1. In another embodiment, the Cas9 molecule is not a S. pyogenes Cas9 molecule. In one embodiment, the Cas9 molecule is a S. pyogenes Cas9 molecule. In another embodiment, the Cas9 molecule is an S. aureus Cas9 molecule. In one embodiment, the Cas9 molecule comprises at least 20%, 30%, 40%, 50%, 55%, 60%, 65%, 70%, 75%, 80%, 85%, 90%, 95%, 99%, or 100% homology with, or which differs by no more than 1, 2, 3, 4, 5, 6, 7, 8, 9, 10, 15, 20, 25, 30, 35, 40, 35, 50, 55, 60, 65, 70, 75, 80, 85, 90, 95, 100, 150, 200, 250, 300, 350 or 400, amino acid residues from, an amino acid sequence of a naturally occurring Cas9 molecule. In one embodiment, the naturally occurring Cas9 molecule is a Cas9 molecule described in Table II.1 herein.

[0082] In one embodiment, the Cas9 molecule is less than about 1300 amino acids in length. In another embodiment, the Cas9 molecule comprises a heterologous PI domain. In another embodiment, the Cas9 molecule comprises a REC2 deletion, REC1_{CT} deletion, or a REC1_{SUB} deletion, or any combination thereof.

[0083] In one embodiment, the Cas9 system further comprises a second Cas9 molecule. In one embodiment, the Cas9 molecule is a nickase, and the second Cas9 molecule is a nickase. In one embodiment, the Cas9 molecule can catalyze a double strand break, and the second Cas9 molecule is a nickase. In one embodiment, the Cas9 molecule is a nickase, and the second Cas9 molecule can catalyze a double strand break. In one embodiment, the Cas9 molecule can catalyze a double strand break, and the second Cas9 molecule can catalyze a double strand break. In one embodiment, the Cas9 molecule and the second Cas9 molecule have the same amino acid sequence, or wherein the Cas9 molecule and the second Cas9 molecule have different amino acid sequences.

[0084] In one embodiment, the Cas9 molecule is an eiCas9 molecule.

[0085] In one embodiment, the Cas9 molecule is an eaCas9 molecule. In one embodiment, the eaCas9 can catalyze a double strand break in the target nucleic acid. In one embodiment, the eaCas9 molecule comprises N-terminal RuvC-like domain cleavage activity and HNH-like domain cleavage activity. In one embodiment, the eaCas9 molecule can catalyze a single strand break in a target nucleic acid. In one embodiment, the eaCas9 molecule comprises HNH-like domain cleavage activity but has no, or no significant, N-terminal RuvC-like domain cleavage activity. In one embodiment, the eaCas9 molecule is an HNH-like domain nickase. In one embodiment, the eaCas9 molecule comprises a mutation at D10. In one embodiment, the eaCas9 molecule comprises N-terminal RuvC-like domain cleavage activity but has no, or no significant, HNH-like domain cleavage activity. In one embodiment, the eaCas9 molecule is an N-terminal RuvC-like domain nickase. In one embodiment, the eaCas9 molecule comprises a mutation at H840 or N863.

[0086] In one embodiment, the Cas9 molecule is less than about 1200, 1100, 1000, 900, or 800 amino acids in length; or between about 800-1300, 900-1200, 900-1100, or 900-1000 amino acids in length.

[0087] In one embodiment, the Cas9 recognizes a PAM site other than NGG, a PAM site other than AGG, or an inverted PAM site.

[0088] In one embodiment, described herein is a cell comprising a Cas9 system. In one embodiment, the cell is a eukaryotic cell. In another embodiment, the cell is a vertebrate, mammalian, rodent, goat, pig, bird, chicken, turkey, cow, horse, sheep, fish, primate, or human cell. In another embodiment, the cell is a plant cell. In one embodiment, the plant cell is a monocot or a dicot. In one embodiment, the cell is a mammalian cell. In one embodiment, the cell is a human cell. In one embodiment, the cell is a somatic cell, a germ cell, or a prenatal cell. In one embodiment, the cell is a zygotic cell, a blastocyst cell, an embryonic cell, a stem cell, a mitotically competent cell, or a meiotically competent cell. In one embodiment, the cell is not part of a human embryo. In one embodiment, the cell is a somatic cell. In one embodiment, the cell is a T cell, a CD8+ T cell, a CD8+ naïve T cell, a central memory T cell, an effector memory T cell, a CD4+ T cell, a stem cell memory T cell, a helper T cell, a regulatory T cell, a cytotoxic T cell, a natural killer T cell, a Hematopoietic Stem Cell, a long term hematopoietic stem cell, a short term hematopoietic stem cell, a multipotent progenitor cell, a lineage restricted progenitor cell, a lymphoid progenitor cell, a myeloid progenitor cell, a common myeloid progenitor cell, an erythroid progenitor cell, a megakaryocyte erythroid progenitor cell, a retinal cell, a photoreceptor cell, a rod cell, a cone cell, a retinal pigmented epithelium cell, a trabecular meshwork cell, a cochlear hair cell, an outer hair cell, an inner hair cell, a pulmonary epithelial cell, a bronchial epithelial cell, an alveolar epithelial cell, a pulmonary epithelial progenitor cell, a striated muscle cell, a cardiac muscle cell, a muscle satellite cell, a neuron, a neuronal stem cell, a mesenchymal stem cell, an induced pluripotent stem (iPS) cell, an embryonic stem cell, a monocyte, a megakaryocyte, a neutrophil, an eosinophil, a basophil, a mast cell, a reticulocyte, a B cell, e.g., a progenitor B cell, a Pre B cell, a Pro B cell, a memory B cell, a plasma B cell, a gastrointestinal epithelial cell, a biliary epithelial cell, a pancreatic ductal epithelial cell, an intestinal stem cell, a hepatocyte, a liver stellate cell, a Kupffer cell, an osteoblast, an osteoclast, an adipocyte, a preadipocyte, a pancreatic islet cell (e.g., a beta cell, an alpha cell, a delta cell), a pancreatic exocrine cell, a Schwann cell, or an oligodendrocyte. In one embodiment, the cell is a T cell, a Hematopoietic Stem Cell, a retinal cell, a cochlear hair cell, a pulmonary epithelial cell, a muscle cell, a neuron, a mesenchymal stem cell, an induced pluripotent stem (iPS) cell, or an embryonic stem cell.

[0089] In one embodiment, described herein is a composition comprising a Cas9 system. In one embodiment, the composition further comprises a pharmaceutically acceptable excipient. In one embodiment, the composition comprises a cell described herein, or a population of cells comprising cells described herein. In one embodiment, when the composition comprises a gRNA molecule and an HDR-enhancer molecule, the gRNA molecule and the HDR-enhancer molecule form part of a single admixture or are provided separately. In another embodiment, when the composition comprises a Cas9 molecule and an HDR-enhancer molecule, the HDR-enhancer molecule and the Cas9 molecule form part of a single admixture or are provided separately. In another embodiment, when the composition comprises a gRNA molecule, a Cas9 molecule, and an HDR-enhancer molecule; the gRNA molecule, the Cas9 molecule, and the HDR-enhancer molecule form part of a single admixture or are provided separately. In another embodiment, when the composition comprises a gRNA molecule, an HDR-enhancer molecule, and a template nucleic acid; the gRNA molecule, the HDR-enhancer molecule, and the template nucleic acid form part of a single admixture or are provided separately. In another embodiment, when the composition comprises a Cas9 molecule, an HDR-enhancer molecule, and a template nucleic acid; the Cas9 molecule, the HDR-enhancer molecule, and the template nucleic acid form part of a single admixture or are provided separately. In another embodiment, when the composition comprises a gRNA molecule, a Cas9 molecule, an HDR-enhancer molecule, and a template nucleic acid; the gRNA molecule, the Cas9 molecule, the HDR-enhancer molecule, and the template nucleic acid form part of a single admixture or are provided separately.

[0090] In one embodiment, described herein is a kit comprising a Cas9 system. In one embodiment, the kit further comprises packaging. In one embodiment, the kit further comprises instructions for use to treat a disorder. In one embodiment, the disorder is a disorder caused by a target position in a target nucleic acid.

[0091] In one embodiment, the nucleic acid encoding the gRNA suitable for targeting the Cas9 molecule to the target nucleic acid in the cell is a DNA molecule. In one embodiment, the nucleic acid encoding the Cas9 molecule is a DNA molecule. In one embodiment, the nucleic acid that encodes the HDR-enhancer molecule is a DNA molecule. In one embodiment, the template nucleic acid is a DNA molecule.

[0092] In one embodiment, the Cas9 system further comprises a nucleic acid that encodes a second gRNA. In one embodiment, the Cas9 system further comprises a nucleic acid that encodes a second Cas9 molecule. In one embodiment, the Cas9 system further comprises a nucleic acid that encodes a second HDR-enhancer. In one embodiment, the Cas9 system further comprises a nucleic acid that encodes a third HDR-enhancer.

[0093] In one embodiment, the HDR-enhancer molecule is a protein. In one embodiment, the HDR-enhancer molecule is an RNA molecule. In one embodiment, the nucleic acid that encodes the HDR-enhancer molecule is a DNA molecule.

[0094] In one embodiment, the nucleic acid encoding the gRNA and the nucleic acid encoding the Cas9 polypeptide are present on a single nucleic acid molecule. In another embodiment, the nucleic acid encoding the gRNA and the nucleic acid encoding the Cas9 polypeptide are present on separate nucleic acid molecules.

[0095] In one embodiment, the nucleic acid encoding the gRNA and the nucleic acid encoding the HDR-enhancer are present on a single nucleic acid molecule. In another embodiment, the nucleic acid encoding the gRNA and the nucleic acid encoding the HDR-enhancer are present on separate nucleic acid molecules. In another embodiment, the nucleic acid encoding the Cas9 polypeptide and the nucleic acid encoding the HDR-enhancer are present on a single nucleic acid molecule. In another embodiment, the nucleic acid encoding the Cas9 polypeptide and the nucleic acid encoding the HDR-enhancer are present on separate nucleic acid molecules. In another embodiment, the nucleic acid encoding the gRNA, the nucleic acid encoding the Cas9 polypeptide, and the nucleic acid encoding the HDR-enhancer are present on a single nucleic acid molecule. In another embodiment, the nucleic acid encoding the gRNA and the nucleic acid encoding the Cas9 polypeptide are present on a single nucleic acid molecule and the nucleic acid encoding the HDR-enhancer is present on a separate nucleic acid molecule. In another embodiment, the nucleic acid encoding the gRNA and the nucleic acid encoding the HDR-enhancer are present on a single nucleic acid molecule and the nucleic acid encoding the Cas9 polypeptide is present on a separate nucleic acid molecule. In another embodiment, the nucleic acid encoding the Cas9 polypeptide and the nucleic acid encoding the HDR-enhancer are present on a single nucleic acid molecule and the nucleic acid encoding the gRNA is present on a separate nucleic acid molecule. In another embodiment, the nucleic acid encoding the gRNA, the nucleic acid encoding the Cas9 polypeptide, and the nucleic acid encoding the HDR-enhancer are each present on separate nucleic acid molecules. In one embodiment, the single nucleic acid molecule is a circular double stranded DNA molecule. In another embodiment, the single nucleic acid molecule is a linear double stranded DNA molecule.

[0096] In one embodiment, one or a plurality of components are provided as a single admixture. In another embodiment, one or a plurality of components are each provided separately from one another. In another embodiment, one or a plurality of components are each provided in separate solutions.

[0097] In one embodiment, the HDR-enhancer molecule is an HDR-enhancing gRNA, and the Cas9 molecule is an enzymatically inactive Cas9 molecule (eiCas9).

[0098] In one embodiment, the HDR-enhancer molecule is an HDR-enhancing gRNA, and the Cas9 molecule is fused to a transcription activator or a transcription repressor. In one embodiment, the Cas9 molecule is an enzymatically inactive Cas9 molecule (eiCas9). In another embodiment, the Cas9 molecule is an enzymatically active Cas9 molecule (eaCas9).

[0099] In one embodiment, the HDR-enhancing gRNA targets the Cas9 molecule to a gene selected from the group consisting of TP53BP1, RIF1, PAXIP1, XRCC6, XRCC5, PRKDC, LIG4, XRCC4, NHEJ1, DCLRElC, BRCA2, RAD51, XRCC1, LIG1, LIG3, POLQ, FBXO18, RTEL1, PARPBP, UIMC1, RAD52, ERCC1, ERCC4, PARP1, BRCA1, RBBP8, EX01, DNA2, MRE11A, RAD50, NBN, MSH2, MSH3, MSH6, MlH1, PMS2, EZH2, KDM4A/JMJD2A, and CKD1.

[0100] In one embodiment, the transcription activator is GAL4, VP16, VP64, a p65 subdomain (NFkB), a histone lysine methyltransferase (KMT), a histone lysine demethylate (KDM), a histone lysine acetyltransferase (KAT), a DNA demethylase, or a protein docking element. In one embodiment, the KMT is hSET1A, hSET1B, MLL1, MLL2, MLL3, MLL4, MLL5, ASH1, Trx, Trr, Ash1, SYMD2, NSD1, or DOT1. In one embodiment, the KDM is LSD1/BHC110, JHDM2a/b, UTX, or JMJD3. In one embodiment, the KAT is hGCN4, PCAF, dGCN5/PCAF, Gcn5, CBP, p300, dCBP/NEJ, TAF1, TIP60/PLIP, MOZ/MYST3, MORF/MYST4, Mst2, Sas3, CG1894, HBO1/MYST2, CHM, Mst2, HMOF/MYST1, dMOF, Sas2, Mst2, SRC1, ACTR, P160, or CLOCK. In one embodiment, the DNA demethylase is AID, TET1, DME, DML1, DML2, ROS1. In one embodiment, the protein docking element is FKBP/FRB (S. pombe) or Pil1/Abyl (E. coli).

[0101] In one embodiment, the transcription repressor is KRAB, Mad mSIN3 interaction domain, the ERF repressor domain, a histone lysine methyltransferase (KMT), a histone lysine demthylase (KDM), a histone lysine deacetylase, a DNA methylase, a boundary element, or a periphery recruitment element. In one embodiment, the KMT is SUV39H1, SUV39H2, G9A, Pr-SET7/8, SUV4-10H1, PR-set7, Suv4-20, Set9, EZH2, RIZ1, LSD1/BHC110, SpLsd1/Swm1/Saf110, Su(var)3-3, JMJD2A/JHDM3A, JMJD2B, JMJD2C/GASC1, JMJD2D, Rph1, JARID1A/RBP2, JARID1B/PLU-1, JARID1C/SMCX, JARID1D/SMCY, Lid, Jhn2, or Jmj2. In one embodiment, the histone lysine deacetylase is HDAC1, HDAC2, HDAC3, HDAC8, Rpd3, Hos1, Cir6, HDAC4, HDAC5, HDAC7, HDAC9, Hdal, Cir3, SIRT1, SIRT2, Sir2, Hst1, Hst2, Hst3, HSt4, or HDAC11. In one embodiment, the DNA methylase is Dam, Dcm, M. SssI, DNMT1, DNMT3a/DNMT3b, METI, DRM3, ZMET2, CMT1, or CMT2. In one embodiment, the boundary element is CTCF. In one embodiment, the periphery recruitment element is LaminA or Lamin B.

[0102] In another aspect, described herein is a vector comprising a Cas9 system, wherein said Cas9 system is a composition comprising a nucleic acid. In one embodiment, the vector is a viral vector. In one embodiment, the vector is an AAV vector. In one embodiment, the vector is IDLV.

[0103] In another aspect, described herein is a reaction mixture comprising a Cas9 system, a cell or population of cells described herein, and a solution. In one embodiment, the solution is a cell growth medium.

[0104] In another aspect, described herein is a method of altering the structure of a cell comprising contacting the cell with a composition, kit, or Cas9 system described herein, or a vector described herein, under conditions that allow for alteration of the structure of the cell, thereby altering the structure of the cell. In one embodiment, the structure of the cell is altered by altering the sequence of a target nucleic acid in the cell.

[0105] In another aspect, described herein is a method of treating a subject by altering the structure of a cell in the subject, comprising contacting the cell with a composition, kit, or Cas9 system described herein, or a vector described herein, under conditions that allow for alteration of the structure of the cell, thereby treating the subject. In one embodiment, the subject has a disorder that is caused by a mutation in the target nucleic acid.

[0106] In another aspect, described herein is a method of promoting DNA repair of a break in a target nucleic acid via an HDR pathway, the method comprising contacting a cell comprising the target nucleic acid with a composition, Cas9 system, or vector described herein under conditions that allow for repair of the break in the target nucleic acid in the cell via an HDR pathway.

[0107] In another aspect, described herein is a method of promoting DNA repair of a double strand break in a target nucleic acid in a cell by an HDR pathway, the method comprising contacting the cell with a gRNA molecule, a Cas9 molecule, and a second gRNA molecule, wherein the gRNA molecule and the second gRNA molecule are oriented on the target nucleic acid such that protospacer adjacent motifs (PAMs) are facing out, wherein the Cas9 nickase molecule cuts the target nucleic acid, resulting in a first 5′ overhang and a second 5′ overhang, thereby promoting DNA repair of the double strand break in the target nucleic acid in the cell via an HDR pathway. In one embodiment, the method further comprises contacting the cell with a template nucleic acid, wherein the template nucleic acid is a single stranded oligonucleotide. In one embodiment, the method further comprises contacting the cell with a template nucleic acid, wherein the template nucleic acid is an endogenous nucleic acid.

[0108] In one embodiment, the altered sequence of the target nucleic acid is a deletion in the target nucleic acid. In one embodiment, a mutant or disease phenotype is converted to a non-mutant or non-disease phenotype. In one embodiment, altering the sequence of the target nucleic acid comprises creating a break in the target nucleic acid. In one embodiment, the break is a single strand break. In one embodiment, the break is a double strand break. In one embodiment, the double strand break is blunt-ended or comprises one or two overhangs.

[0109] In one embodiment, altering the sequence of the target nucleic acid comprises resection. In one embodiment, resection occurs at a double strand break. In another embodiment, resection occurs at a single strand break.

[0110] In one embodiment, the sequence of the target nucleic acid is altered via HR-mediated repair, SSA-mediated repair, or alt-HR-mediated repair. In one embodiment, the level of HR-mediated repair, SSA-mediated repair, or alt-HR-mediated repair is increased as compared to the level of HR-mediated repair, SSA-mediated repair, or alt-HR-mediated repair that would occur in the absence of the HDR-enhancer or in the absence of the eaCas9 molecule.

[0111] In one embodiment, the method comprises contacting the cell with a nucleic acid encoding DNA encoding the gRNA, and allowing the cell to produce the gRNA. In one embodiment, the method comprises contacting the cell with a nucleic acid encoding the Cas9 molecule, and allowing the cell to produce the Cas9 molecule. In one embodiment, the method comprises contacting the cell with a nucleic acid that encodes both the gRNA and the Cas9 molecule, and allowing the cell to produce the gRNA and the Cas9 molecule. In one embodiment, the method comprises contacting the cell with a nucleic acid that encodes the gRNA, the Cas9 molecule, and the template nucleic acid; and allowing the cell to produce the gRNA and the Cas9 molecule. In one embodiment, the method comprises contacting the cell with a nucleic acid that encodes the HDR-enhancer, and allowing the cell to produce the HDR-enhancer.

[0112] In one embodiment, the HDR-enhancer molecule is a chromatin modifying agent. In one embodiment, the chromatin modifying agent is a chromatin modifying agent other than CKD1. In one embodiment, the chromatin at the target nucleic acid is altered.

[0113] In one embodiment, the method further comprises assaying the chromatin state of the cell. In one embodiment, the chromatin state of the target nucleic acid is assayed. In another embodiment, assaying cell cycle status of the cell comprises determining whether the cell is in G2 phase.

[0114] In one embodiment, the HDR-enhancer molecule is a cell cycle arrest agent. In one embodiment, the cell cycle arrest agent is not a Cdk1 inhibitor. In one embodiment, the cell arrests in G2. In one embodiment, the cell reversibly arrests in G2.

[0115] In one embodiment, the method only substantially down-regulates one DNA repair pathway, or wherein the cell is contacted with only one HDR-enhancer.

[0116] In one embodiment, the method further comprising contacting the cell with a second gRNA, wherein the gRNA is configured to guide the Cas9 molecule to produce a first break, and the second gRNA is configured to guide a second Cas9 molecule to produce a second break. In one embodiment, the first break is a single strand break and the second break is a single strand break, the first break is a single strand break and the second break is a double strand break, the first break is a double strand break and the second break is a single strand break, or the first break is a double strand break and the second break is a double strand break.

[0117] In one embodiment, the method further comprises contacting the cell with a third gRNA, wherein the third gRNA is configured to guide a third Cas9 molecule to produce a third break. In one embodiment, the method further comprises contacting the cell with a fourth gRNA, wherein the fourth gRNA is configured to guide a fourth Cas9 molecule to produce a fourth break.

[0118] In one embodiment, the method further comprises a step of removing the cell from the subject's body before contacting the cell with the gRNA, the Cas9 molecule, the template nucleic acid, or the HDR-enhancer. In one embodiment, the method further comprises a step of returning the cell to the subject's body after contacting the cell with the gRNA, the Cas9 molecule, the template nucleic acid, or the HDR-enhancer. In one embodiment, the method further comprises a step of placing the cell in a subject's body after contacting the cell with the gRNA, the Cas9 molecule, the template nucleic acid, or the HDR-enhancer.

[0119] In one embodiment, the cell is contacted with the HDR-enhancer after being contacted with one or more of the gRNA, the Cas9 molecule, and/or template nucleic acid.

[0120] In one embodiment, the cell is contacted with the HDR-enhancer before being contacted with one or more of the gRNA, the Cas9 molecule, and/or the template nucleic acid.

[0121] In one embodiment, the cell is contacted with two or more of the gRNA, the Cas9 molecule, the template nucleic acid, and the HDR-enhancer at substantially the same time. In one embodiment, the cell is contacted with the gRNA and the Cas9 molecule at substantially the same time.

[0122] In one embodiment, a target position in the target nucleic acid is altered to comprise the sequence of at least a portion of a template nucleic acid. In one embodiment, the target nucleic acid bears a mutation relative to a corresponding wild-type sequence, and wherein a template nucleic acid comprises the corresponding wild-type sequence. In one embodiment, the target nucleic acid is pathogenic DNA, and wherein a template nucleic acid contains a mutation relative to the pathogenic DNA.

[0123] In one embodiment, a subject has a disorder that is caused by a mutation in the target nucleic acid. In one embodiment, the disorder is cancer, a genetic disease, an infectious disease, a disorder caused by aberrant mitochondrial DNA (mtDNA), a metabolic disease, a disorder caused by aberrant cell cycle, a disorder caused by aberrant angiogenesis, a disorder caused by aberrant DNA damage repair, or a pain disorder.

[0124] In one embodiment, the method further comprises a step of removing the cell from the subject's body before contacting the cell with the composition or the vector, and a step of returning the cell to the subject's body after contacting the cell with the composition or the vector. In one embodiment, the cell is present in the body of a subject. In one embodiment, the cell is not present in the body of a subject. In one embodiment, the cell is present in a tissue culture vessel.

[0125] In one embodiment, the cell is in G1 phase at the time the cell is contacted with the composition or the vector. In one embodiment, the cell is in G1 phase at the time the Cas9 molecule cleaves the target position. In one embodiment, the cell is in G1 phase at the time the Cas9 molecule-mediated break is repaired by HDR.

[0126] In one embodiment, the cell is in S phase at the time the cell is contacted with the composition or the vector. In one embodiment, the cell is in S phase at the time a Cas9 molecule cleaves a target position. In one embodiment, the cell is in S phase at the time a Cas9 molecule-mediated break is repaired by HDR.

[0127] In one embodiment, the cell is in G2 phase at the time the cell is contacted with the composition or the vector. In one embodiment, the cell is in G2 phase at the time a Cas9 molecule cleaves a target position. In one embodiment, the cell is in G2 phase at the time a Cas9 molecule-mediated break is repaired by HDR.

[0128] In one aspect, described herein is a method of producing the composition, cell, population of cells, kit, or Cas9 system described herein, the method comprising: providing one or more of the gRNA molecule and the Cas9 molecule; providing the HDR-enhancer molecule; and admixing one or more of the gRNA molecule and the Cas9 molecule with the HDR-enhancer molecule. In one embodiment, the method further comprises providing a template nucleic acid and admixing one or more of the gRNA molecule, the Cas9 molecule, the HDR-enhancer molecule with the template nucleic acid.

[0129] An additional way of promoting genome editing involves the mismatch repair (MMR) pathway. Certain forms of genome editing, such as an alt-HR pathway, can produce a mismatch in the genome. In some cases the MMR pathway “corrects” the mismatch back to the original sequence, which is an undesirable outcome. To safeguard the edit in the genome, one can down-regulate the MMR pathway in the edited cell.

[0130] In one aspect, described herein is a Cas9 system comprising a down-regulator of MMR and one or more of a gRNA molecule and a Cas9 molecule. In one embodiment, the down-regulator of MMR is an inhibitor of a factor listed in Table VI.15. In one embodiment, the down-regulator of MMR is an siRNA, an antibody, a small molecule, or an HDR-enhancing gRNA. In one embodiment, the antibody is an intrabody. In one embodiment, the siRNA or the antibody is directed against a factor listed in Table VI.15. In one embodiment, the down-regulator of MMR is an agent of Table VI.16. In one embodiment, the Cas9 system further comprises a template nucleic acid. In one embodiment, the down-regulator of MMR increases the likelihood that a mismatched base pair in the target nucleic acid will be resolved to have a sequence corresponding to the sequence of a template nucleic acid rather than the sequence of the target nucleic acid before the mismatch was created. In one embodiment, the Cas9 system comprises a nucleic acid encoding the down-regulator of MMR and one or more nucleic acids encoding a gRNA or a Cas9 polypeptide. In one embodiment, the nucleic acids are present in one or more vectors. In one embodiment, the one or more vectors is one or more an AAV vectors.

[0131] In another aspect, described herein is a reaction mixture comprising a cell or population of cells described herein, and a solution. In one embodiment, the solution is a growth medium.

[0132] In another aspect, the described herein is a method of altering the structure of a cell comprising contacting the cell with a Cas9 system described herein, resulting in alteration of the structure of the cell. In one embodiment, the altering the structure of the cell comprises altering the sequence of a target nucleic acid of the cell.

[0133] In another aspect, the described herein is a method of treating a subject by altering the structure of a cell in said subject, comprising contacting the cell with a composition, kit, or Cas9 system described herein under conditions that allow for alteration of the structure of the cell, thereby treating the subject.

[0134] In other circumstances, it is desirable to provide an environment favoring nucleotide insertions and/or deletions at the break site via an error-prone repair (EPR) pathway such as alt-NHEJ. To cause a cell to favor an EPR pathway, one can omit a template nucleic acid and contact the cell with an agent that enhances an EPR pathway. An EPR enhancer can be, e.g., an agent that inhibits another DNA damage repair pathway, with the result that the cell becomes more likely to use an alt-NHEJ pathway rather than the inhibited pathway. Other EPR-enhancers directly stimulate an EPR pathway.

[0135] In another aspect, the invention provides a Cas9 system comprising an error-prone repair (EPR)-enhancer and one or more of a gRNA molecule and a Cas9 molecule. In one embodiment, the Cas9 system does not comprise a template nucleic acid. In one embodiment, the Cas9 system further comprises a template nucleic acid. In one embodiment, the Cas9 system comprises a nucleic acid encoding the EPR-enhancer and one or more nucleic acids encoding the gRNA or the Cas9 polypeptide. In one embodiment, the nucleic acids are present in one or more vectors. In one embodiment, the vector is an AAV vector.

[0136] In one embodiment, the EPR-enhancer is a down-regulator of HDR, an up-regulator of alt-NHEJ, an inhibitor of BRCA1, an up-regulator of SSA, a down-regulator of C-NHEJ, or an agent that promotes resection. In one embodiment, the down-regulator of HDR is an inhibitor of a protein of Table VI.1(C) or VI.2 or an agent of Table VI.3. In one embodiment, the up-regulator of alt-NHEJ is a protein of Table VI.9 or VI.1(J), or an amino acid comprising at least 60, 70, 80, 90, 95, 98, 99 or 100% homology with, or which differs by no more than 50, 40, 30, 20, 15, 10, 5, 4, 3, 2, or 1, amino acid residues from a protein of Table VI.9 or VI.1(J). In one embodiment, the inhibitor of BRCA1 is an siRNA or antibody directed against BRCA1. In one embodiment, the up-regulator of SSA is an inhibitor of BRCA2 or RAD51. In one embodiment, the inhibitor is an siRNA, an antibody, or an HDR-enhancing gRNA. In one embodiment, the down-regulator of C-NHEJ is an inhibitor of a protein of Table VI.1(B) or VII.7, or an agent of Table VI.8. In one embodiment, the agent that promotes resection is a recombinant pro-resection protein or an inhibitor of an anti-resection protein. In one embodiment, the pro-resection protein is a nuclease. In one embodiment, the anti-resection protein is 53BP1, Rif1, or PTIP. In one embodiment, the agent that promotes resection is an agent of Table VI.8. In one embodiment, the inhibitor of an anti-resection protein is a dominant negative 53BP1 protein.

[0137] In one aspect, provided herein is a method of altering the structure of a cell comprising contacting the cell with a composition, kit, or Cas9 system described herein, resulting in alteration of the structure of the cell.

[0138] In another aspect, described herein is a method of treating a subject by altering the structure of a cell in said subject, comprising contacting the cell with a composition, kit, or Cas9 system described herein, resulting in alteration of the sequence of the target nucleic acid. In one embodiment, no template nucleic acid is provided. In one embodiment, the structure of the cell is altered by altering the structure of a target nucleic acid, and wherein the structure of the nucleic acid is altered via alt-NHEJ-mediated repair or SSA-mediated repair.

[0139] In some embodiments, the HDR-enhancer molecule is an HDR-enhancer of Section 1 of this Summary, entitled “Exemplary HDR-enhancers.” In embodiments, the gRNA is a gRNA of Section 2 of this Summary, entitled “Characteristics of the gRNA.” In embodiments, the Cas9 molecule is a Cas9 molecule of Section 3 of this Summary, entitled “Characteristics of the Cas9 molecule.” In embodiments, the template nucleic acid is a template nucleic acid of Section 4 of this Summary, entitled “Characteristics of the template.” In embodiments, the cell is a cell of Section 5 of this Summary, entitled “Characteristics of the cell.” In embodiments, one or more of Properties (i)-(x) are present and are as described in Section 6 of this Summary, entitled “Properties (i)-(x) and characterization thereof.” In embodiments, a composition comprises a characteristic set out in Section 9 of this Summary, entitled “Characteristics of nucleic acid compositions.” In embodiments, the composition comprises a characteristic set out in Section 10 of this Summary, entitled “Additional characteristics of Cas9 systems.”

[0140] 1. Exemplary HDR-Enhancers

[0141] In some embodiments, the HDR-enhancer molecule is a down-regulator of HR, a down-regulator of canonical NHEJ, a down-regulator of alt-NHEJ, a down-regulator of an antirecombinant factor, a down-regulator of SSA, a down-regulator of SSBR, a down-regulator of MMR, a chromatin modification agent, a cell cycle arrest compound, an agent capable of promoting resection at a double strand break, a down-regulator of SD-MMEJ, or a down-regulator of blunt EJ. In one embodiment, the HDR-enhancer molecule is a down-regulator of anti-HR (e.g., an inhibitor of a protein which inhibits HR or promotes repression of HR). In some embodiments, other HDR pathways, such as alt-HR and/or SSA, are promoted and/or the HDR-enhancer molecule is capable of promoting other HDR pathways, such as alt-HR and/or SSA, e.g., as compared to what would be seen in the absence of the down-regulator of anti-HR. In some embodiments, the HDR-enhancer molecule is an inhibitor of a component of Table VI.4 or Table VI.1(D). In some embodiments, the HDR-enhancer molecule is an antibody, e.g., an intrabody, or an siRNA, directed, e.g., against a component from Table VI.4 or Table VI.1(D). In other embodiments, the HDR-enhancer molecule is an HDR-enhancing gRNA directed against one of the repressors or activators described in Example 13. In some embodiments, the HDR-enhancer molecule is an agent of Table VI.5. In some embodiments, the HDR-enhancer inhibits Fbh1, PARI, Rap80, miR-155, miR-545, miR-107, miR-1255, miR-148, or miR-193. In some embodiments, the HDR-enhancer that inhibits Fbh1 is an siRNA. In some embodiments, the HDR enhancer that inhibits PARI is an siRNA. In some embodiments, the HDR-enhancer that inhibits RAP80 is an siRNA. In some embodiments, the HDR-enhancer that inhibits miR-155, miR-545, miR-107, miR-1255, miR-148, or miR-193 is an anti-miR.

[0142] In some embodiments, the HDR-enhancer molecule is a down-regulator of SSA (e.g., an inhibitor of a protein, which protein promotes SSA). In embodiments, other HDR pathways, such as alt-HR and/or alt-HR are promoted, e.g., as compared to what would be seen in the absence of the down-regulator of SSA. In embodiments the HDR-enhancer molecule is an inhibitor of a component of Table VI.1(E) or VI.11. In embodiments, the HDR-enhancer molecule is an antibody, e.g., an intrabody, or an siRNA, directed, e.g., against a component from Table VI.1(E) or VI.11. In other embodiments, the HDR-enhancer molecule is an HDR-enhancing gRNA directed against one of the repressors or activators described in Example 13. In embodiments the HDR-enhancer molecule is an agent of Table VI.12. In embodiments the HDR-enhancer inhibits Rad52 or ERCC1. In embodiments the HDR-enhancer that inhibits Rad52 or ERCC1 is an siRNA.

[0143] In embodiments, the HDR-enhancer molecule is a chromatin modification agent (e.g., an agent that inhibits a chromatin modification protein that promotes a DNA repair pathway). In some embodiments, the chromatin modification agent is not an HDAC, e.g., is not HDAC1 or HDAC2. In embodiments HDR is promoted and/or the HDR-enhancer molecule is capable of promoting HDR, e.g., as compared to what would be seen in the absence of the chromatin modification agent. In embodiments the HDR-enhancer molecule is administered in an amount sufficient to alter chromatin at the target nucleic acid. In embodiments the chromatin at the target nucleic acid is altered. In embodiments, the chromatin modification agent is not an HDAC, e.g., is not HDAC1 or HDAC2. In embodiments, the HDR-enhancer molecule is a modulator, e.g., inhibitor, of a component of Table VI.1(I). In embodiments, the HDR-enhancer molecule is an antibody, e.g., an intrabody, or an siRNA, directed, e.g., against a component from Table VI.1(I). In another embodiment, the HDR-enhancer molecule is an HDR-enhancing gRNA as described herein and in Example 13. In embodiments, the HDR-enhancer molecule is an agent of Table VII. In embodiments, the HDR-enhancer inhibits EZH2 or an HDAC. In embodiments, the HDR-enhancer that inhibits EZH2 is EPZ-6438. In embodiments, the HDR-enhancer that inhibits the HDAC is TCA.

[0144] In embodiments, the HDR-enhancer molecule is a down-regulator of SSBR (e.g., an inhibitor of a protein, which protein promotes SSBR). In embodiments, HDR is promoted and/or the HDR-enhancer molecule is capable of promoting HDR, e.g., as compared to what would be seen in the absence of the down-regulator of SSBR. In embodiments, the HDR-enhancer molecule is an inhibitor of a component of Table VI.13 or VI.1(F). In embodiments, the HDR-enhancer molecule is an agent of Table VI.14. In embodiments, the HDR-enhancer molecule is an antibody, e.g., an intrabody or an siRNA, directed, e.g., against a component from Table VI.13 or VI.1(F). In another embodiment, the HDR-enhancer molecule is an HDR-enhancing gRNA as described herein or in Example 13. In embodiments, the HDR-enhancer inhibits a PARP or XRCC1. In embodiments, the HDR-enhancer that inhibits a PARP is selected from: AZD2281, KU-0059436, and BMN673. In embodiments, the HDR-enhancer that inhibits XRCC1 is an siRNA.

[0145] In embodiments, the HDR-enhancer molecule is an agent capable of promoting resection and/or promotes resection at a single or double strand break. In embodiments, HDR is promoted and/or the HDR-enhancer capable of promoting resection is capable of promoting HDR, e.g., as compared to what would be seen in the absence of the HDR-enhancer that promotes resection. In embodiments, the HDR-enhancer that promotes resection at a single or double strand break is an endonuclease or exonuclease. In embodiments, the HDR-enhancer that promotes resection is an inhibitor of an anti-resection protein, e.g., an anti-resection protein of Table VI.1(A). In embodiments, the HDR-enhancer molecule is an antibody, e.g., an intrabody, or an siRNA, directed, e.g., against a component from Table VI.1(A). In one embodiment, the HDR-enhancer molecule is an HDR-enhancing gRNA as described herein or in Example 13. In embodiments, the HDR-enhancer that is an inhibitor of an anti-resection protein is an inhibitor of 53BP1, Rif-1, or PTIP. In one embodiment, the inhibitor of an anti-resection protein is a dominant negative 53BP1 protein.

[0146] In embodiments, the HDR-enhancer molecule is a down-regulator of SDMMEJ. In embodiments, the HDR-enhancer molecule is an inhibitor of Pol Theta. In embodiments, the HDR-enhancer molecule is a down-regulator of EJ.

[0147] In embodiments, the HDR-enhancer molecule is an agent that promotes cell cycle arrest in G2. In embodiments, the HDR-enhancer molecule is administered in an amount sufficient to cause the cell to arrest in G2. In embodiments, the cell arrests in G2, e.g., reversibly arrests in G2. In embodiments, the HDR-enhancer molecule is a CDK1 inhibitor. In embodiments, the HDR-enhancer molecule is not a CDK1-inhibitor. In embodiments, the HDR-enhancer molecule is an agent of Table VIII.

[0148] In embodiments, the HDR-enhancer molecule is a down-regulator of C-NHEJ. In embodiments, HDR is promoted and/or the down-regulator of C-NHEJ is capable of promoting HDR, e.g., as compared to what would be seen in the absence of the down-regulator of C-NHEJ. In embodiments, the HDR-enhancer molecule is an inhibitor of a component of Table VI.7 or VI.1(B). In embodiments, the HDR-enhancer molecule is an antibody, e.g., an intrabody, or an siRNA, directed, e.g., against a component from Table VI.7 or VI.1(B). In embodiments, the HDR-enhancer molecule is an HDR-enhancing gRNA as described herein or in Example 13. In embodiments, the HDR-enhancer molecule is an agent of Table VI.8. In embodiments, the HDR-enhancer molecule is an inhibitor of DNA Pk or 53BP1. In embodiments, the HDR-enhancer that inhibits DNA Pk is selected from: NU7441, CC115, and NK314. In embodiments, the HDR-enhancer that inhibits 53BP1 is an siRNA targeting 53BP1. In one embodiment, the inhibitor of an anti-resection protein is a dominant negative 53BP1 protein.

[0149] In embodiments, the HDR-enhancer molecule is a down-regulator of alt-NHEJ, e.g., SD-MMEJ. In embodiments, HDR is promoted and/or the down-regulator of alt-NHEJ is capable of promoting HDR, e.g., as compared to what would be seen in the absence of the down-regulator of alt-NHEJ. In embodiments, the HDR-enhancer molecule is an inhibitor of a component of Table VI.9 or Table VI.1(J). In embodiments, the HDR-enhancer molecule is an antibody, e.g., an intrabody or an siRNA, directed, e.g., against a component from Table VI.9 or Table VI.1(J). In embodiments, the HDR-enhancer molecule is an agent of Table VI.10. In embodiments, the HDR-enhancer molecule is an HDR-enhancing gRNA as described herein.

[0150] In embodiments, the HDR-enhancer molecule is an up-regulator of HDR. In embodiments, the up-regulator of HDR is a protein selected from: MRE11, RAD50, NBS1, BRCA2, and BRCA1, or an amino acid comprising at least 60, 70, 80, 90, 95, 98, 99 or 100% homology with, or which differs by no more than 50, 40, 30, 20, 15, 10, 5, 4, 3, 2, or 1, amino acid residues from a naturally occurring MRE11, RAD50, NBS1, BRCA2, or BRCA1. In embodiments, the up-regulator of HDR is a protein of Table VI.2 or a protein of Table VI.1(C), or an amino acid comprising at least 60, 70, 80, 90, 95, 98, 99 or 100% homology with, or which differs by no more than 50, 40, 30, 20, 15, 10, 5, 4, 3, 2, or 1, amino acid residues from, a sequence of Table VI.2 or Table VI.1(C). In another embodiment, the up-regulator of HDR is a dominant negative CtIP. A dominant negative CtIP promotes resection in G1 phase.

[0151] In embodiments, the HDR-enhancer molecule is a down-regulator of one HDR pathway (e.g., an inhibitor of a protein, which protein promotes HDR). In embodiments, alt-HR or SSA is promoted and/or the down-regulator of HDR is capable of promoting alt-HR or SSA, e.g., as compared to what would be seen in the absence of the down-regulator of HDR. In embodiments, the HDR-enhancer molecule is an inhibitor of a component of Table VI.2 or VI.1(C). In embodiments, the HDR-enhancer molecule is an antibody, e.g., an intrabody, or an siRNA, directed, e.g., against a component from Table VI.2 or VI.1(C). In embodiments, the HDR-enhancer molecule is an agent of Table VI.3. In embodiments, the HDR-enhancer inhibits BRCA2, BRCA1, or RAD51. In embodiments, the HDR-enhancer molecule is an antibody, e.g., an intrabody, or an siRNA, directed, e.g., against a BRCA2, BRCA1, or RAD51. In some embodiments, the HDR-enhancer molecule is an HDR-enhancing gRNA as described herein and in Example 13. In embodiments, the HDR-enhancer molecule is an siRNA directed against BRCA2, BRCA1, or RAD51. In embodiments, the HDR-enhancer molecule is selected from: B02, A03, AI-10, RI-1, RI-2, and IBR2.

[0152] In embodiments, HDR-enhancer comprises an siRNA. In embodiments, the HDR-enhancer comprises an siRNA directed against an mRNA that encodes a target. In embodiments, the HDR-enhancer comprises a polypeptide, e.g., an antibody, e.g., an intrabody, optionally comprising a nuclear localization sequence.

[0153] In embodiments, the Cas9 system comprises an additional one or more HDR-enhancers, e.g., exactly two or exactly three HDR-enhancers. In embodiments, the HDR-enhancer of and the additional HDR-enhancer are capable of (i) up-regulating the same pathway, or (ii) down-regulating the same pathway.

[0154] 2. Characteristics of the gRNA

[0155] In embodiments, the gRNA comprises a targeting domain, first and second complementary domains, and a proximal domain.

[0156] In embodiments, the gRNA is chimeric. In embodiments, the gRNA is modular.

[0157] In embodiments, the at least one domain of a preselected length is a targeting domain which is 12-30 nucleotides in length. In embodiments, the targeting domain is at least 20, 21, 22, 23, 24, 25, 26, 27, 28, 29, or 30 nucleotides in length. In embodiments, the targeting domain is at most 20, 19, 18, 17, or 16 nucleotides in length. In embodiments, the first complementarity domain is at least 12, 13, 14, 15, 16, 17, 18, 19, 20, 21, 22, 23, 24, or 25 nucleotides in length. In embodiments, the first complementarity domain is at most 12, 11, 10, 9, 8, or 7 nucleotides in length. In embodiments, the linking domain is at least 4, 5, 6, 7, 8, 9, 10, 15, 20, or 25 nucleotides in length. In embodiments, the linking domain is at most 4, 3, or 2 nucleotides in length. In embodiments, the second complementarity domain is at least 14, 15, 16, 17, 18, 19, 20, 21, 22, 23, 24, or 25 nucleotides in length. In embodiments, the second complementarity domain is at most 12, 11, 10, 9, 8, 7, 6, or 5 nucleotides in length. In embodiments, the at least one domain of a preselected length is a domain encompassing the proximal domain and the tail domain, which taken together are at least 15, 18, 20, 25, 30, 31, 35, 40, 45, 49, 50, or 53 nucleotides in length. In an embodiment, the 5′ extension domain is, 2-10, 2-9, 2-8, 2-7, 2-6, 2-5, 2-4 nucleotides in length. In an embodiment, the 5′ extension domain is 2, 3, 4, 5, 6, 7, 8, 9, or 10 or more nucleotides in length.

[0158] In embodiments, the Cas9 system further comprises a second gRNA. In embodiments, the gRNA of (a) is configured to guide the Cas9 molecule of (b) to produce a first break, and a second gRNA is configured to guide a second Cas9 molecule to produce a second break. In one embodiment, the gRNA of (a) and the second gRNA are configured to position the first break and the second break: within 55 nucleotides of one another; at least 25 nucleotides apart; or within 25-65 nucleotides of one another.

[0159] 3. Characteristics of the Cas9 Molecule

[0160] In embodiments, the Cas9 molecule is an eaCas9 molecule. In embodiments, the eaCas9 forms a double strand break in the target nucleic acid.

[0161] In embodiments, the Cas9 molecule is a protein selected from Table 111.1, e.g., a Cas9 molecule other than a S. pyogenes Cas9 molecule. In some embodiments, the Cas9 molecule is a S. pyogenes Cas9 molecule. In other embodiments, the Cas9 molecule is a S. aureus Cas9 molecule.

[0162] In embodiments, the eaCas9 molecule comprises N-terminal RuvC-like domain cleavage activity and HNH-like domain cleavage activity. In embodiments, the eaCas9 molecule forms a single strand break in a target nucleic acid. In embodiments, the eaCas9 molecule comprises HNH-like domain cleavage activity but has no, or no significant, N-terminal RuvC-like domain cleavage activity. In embodiments, the eaCas9 molecule is an HNH-like domain nickase. In embodiments, the eaCas9 molecule comprises a mutation at D10. In embodiments, the eaCas9 molecule comprises N-terminal RuvC-like domain cleavage activity but has no, or no significant, HNH-like domain cleavage activity. In embodiments, the eaCas9 molecule is an N-terminal RuvC-like domain nickase. In embodiments, the eaCas9 molecule comprises a mutation at H840.

[0163] In embodiments, the Cas9 molecule comprises a REC₂ deletion, REC1_{CT} deletion, or a REC1_{SUB} deletion, or any combination thereof. In embodiments, the Cas9 molecule comprises an altered PI domain.

[0164] In embodiments, the Cas9 molecule is less than about 1300 amino acids in length. In embodiments, the Cas9 molecule is: less than about 1200, 1100, 1000, 900, or 800 amino acids in length; or between about 800-1300, 900-1200, 900-1100, or 900-1000 amino acids in length.

[0165] In embodiments, the Cas9 molecule is a protein selected from Table 111.1 In some embodiments, the Cas9 molecule is not a S. pyogenes Cas9, e.g., does not comprise SEQ ID NO: 2. In one embodiment, the Cas9 molecule is an S. aureus Cas9 molecule. In one embodiment, the Cas9 molecule is an S. pyogenes Cas9 molecule.

[0166] In embodiments, the Cas9 system further comprises a second Cas9 molecule. In embodiments, the Cas9 molecule of (b) is a nickase and the second Cas9 molecule is a nickase; the Cas9 molecule of (b) can catalyze a double strand break and the second Cas9 molecule is a nickase; the Cas9 molecule of (b) is a nickase and the second Cas9 molecule can catalyze a double strand break; or the Cas9 molecule of (b) can catalyze a double strand break and the second Cas9 molecule can catalyze a double strand break.

[0167] In some embodiments, the Cas9 recognizes a PAM site other than NGG, e.g., other than AGG. In some embodiments, the Cas9 recognizes an inverted PAM site, e.g., a Pam site that faces outward.

[0168] In embodiments, the Cas9 molecule targeted by the gRNA of (a) has the same structure, e.g., amino acid sequence, as the Cas9 molecule targeted by the second gRNA. In other embodiments, the Cas9 molecule targeted by the gRNA of (a) has a different structure, e.g., amino acid sequence, as the Cas9 molecule targeted by the second gRNA.

[0169] 4. Characteristics of the Template

[0170] In embodiments, the template nucleic acid comprises, or comprises a part of, a circular nucleic acid. In embodiments, the template nucleic acid is a circular nucleic acid, e.g., a plasmid. In embodiments, the template nucleic acid is a linear nucleic acid. In some embodiments, the template nucleic acid is DNA. In some embodiments, the template nucleic acid is RNA. In embodiments, the template nucleic acid comprises a double stranded sequence or a single strand sequence, e.g., a single stranded oligonucleotide. In one embodiment, the template is a single stranded/double-stranded DNA hybrid. In another embodiment, the template is present on a circular plasmid. In one embodiment, the donor template is in an AAV or an IDLV. In yet another embodiment, the template nucleic acid is an endogenous nucleic acid. In embodiments, the template nucleic acid comprises about 150-200 nucleotides of homology with a target nucleic acid. In embodiments, the template nucleic acid is linear and comprises about 150-200 nucleotides of homology with a target nucleic acid. In embodiments, the 150-200 nucleotides of homology correspond to one side of a break in a target nucleic acid. In embodiments, the 150-200 nucleotides of homology correspond to two sides of a break in a target nucleic acid. In embodiments, the template nucleic acid comprises about 500-2000 nucleotides of homology with a target nucleic acid.

[0171] In embodiments, the template nucleic acid is circular and comprises about 500-2000 nucleotides of homology with a target nucleic acid. In embodiments, the 500-2000 nucleotides of homology correspond to one side of a break in a target nucleic acid. In embodiments, the 500-2000 nucleotides of homology correspond to two sides of a break in a target nucleic acid. In embodiments, the template nucleic acid has homology to the target nucleic acid on one side of the break. In embodiments, the template nucleic acid has homology to the target nucleic acid on two sides of the break.

[0172] In embodiments, the template nucleic acid comprises a human sequence, e.g., a wild-type human sequence. In embodiments, the template nucleic acid comprises a wild-type human sequence corresponding to a mutation at a target nucleic acid. In embodiments, the template nucleic acid lacks repeated elements such as an Alu sequence or a LINE sequence.

[0173] In embodiments, the template nucleic acid comprises a modified nucleic acid.

[0174] In embodiments, one or both of the 3′ and 5′ homology arms, each independently has a length of: at least 50, 100, 250, 500, 750, 1000, 2000, 3000, 4000, or 5000 nucleotides; no more than 50, 100, 250, 500, 750, 1000, 2000, 3000, 4000, or 5000 nucleotides; or between 50-100, 100-250, 250-500, 500-750, 750-1000, 1000-2000, 2000-3000, 3000-4000, or 4000-5000 nucleotides.

[0175] In embodiments, a homology arm (e.g., the 5′ homology arm or the 3′ homology arm, or both) has a 5′ end and a 3′ end and: the 5′ end is at least 50, 100, 250, 500, 750, 1000, 2000, 3000, 4000, or 5000 nucleotides from the target position, the 5′ end is no more than 50, 100, 250, 500, 750, 1000, 2000, 3000, 4000, or 5000 nucleotides from the target position, the 5′ end between 50-100, 100-250, 250-500, 500-750, 750-1000, 1000-2000, 2000-3000, 3000-4000, or 4000-5000 nucleotides from the target position, the 3′ end is at least 50, 100, 250, 500, 750, 1000, 2000, 3000, 4000, or 5000 nucleotides from the target position, the 3′ end is no more than 50, 100, 250, 500, 750, 1000, 2000, 3000, 4000, or 5000 nucleotides from the target position, or the 3′ end between 50-100, 100-250, 250-500, 500-750, 750-1000, 1000-2000, 2000-3000, 3000-4000, or 4000-5000 nucleotides from the target position. In embodiments, the replacement sequence has a length of: at least 1, 2, 3, 5, 10, 20, 50, 100, 200, 500, 1000, 2000, 300, 4000, or 5000 nucleotides, no more than 2, 3, 5, 10, 20, 50, 100, 200, 500, 1000, 2000, 300, 4000, or 5000 nucleotides, or between 1-3, 1-5, 1-10 10-20, 20-50, 50-100, 100-200, 200-500, 500-1000, 1000-2000, 2000-3000, 3000-4000, or 4000-5000 nucleotides.

[0176] In embodiments, the target nucleic acid bears a mutation relative to a corresponding wild-type sequence, and the template nucleic acid contains the corresponding wild-type sequence. In embodiments, the target nucleic acid is pathogenic DNA, and the template nucleic acid contains a mutation relative to the pathogenic DNA.

[0177] In embodiments, the replacement sequence occupies no more than 17%, 16%, 15%, 14%, 13%, 12%, 11%, 10%, 9%, 8%, 7%, 6%, 5%, 4%, 3%, 2%, or 1% of the template nucleic acid. In embodiments, the replacement sequence is at least 17, 18, 19, 20, 25, 30, 40, 50, or 100 nucleotides. In embodiments, the replacement sequence is 1 or 2 nucleotides. In another embodiment, the replacement sequence is 1, 10, 20, 30, 40, 50, 75, 100, 200, 250, 300, 500, 750, or 1000 nucleotides.

[0178] 5. Characteristics of the Cell

[0179] In embodiments, the disclosure provides a cell comprising a Cas9 system described herein.

[0180] In embodiments, the cell is a eukaryotic cell. The cell may be, e.g., a vertebrate, mammalian, rodent, goat, pig, bird, chicken, turkey, cow, horse, sheep, fish, primate, plant, or human cell. In embodiments, the cell is a plant cell. The plant cell may be, e.g., monocot or dicot. In embodiments, cell is a mammalian cell, e.g., a human cell. In embodiments, the cell is a somatic cell, germ cell, or prenatal cell. In embodiments, the cell is a zygotic, blastocyst or embryonic cell, a stem cell, a mitotically competent cell, or a meiotically competent cell. In embodiments, the cell is not part of a human embryo. In embodiments, the cell is a somatic cell.

[0181] In embodiments, the cell is situated in a subject's body. In embodiments, the cell is not situated in a subject's body. In embodiments, the cell is situated in a tissue culture vessel.

[0182] In embodiments, the cell is a T cell, a Hematopoietic Stem Cell, a retinal cell, a cochlear hair cell, a pulmonary epithelial cell, a muscle cell, a neuron, a mesenchymal stem cell, an induced pluripotent stem (iPS) cell, or an embryonic stem cell. In embodiments, the cell is a T cell, a CD8+ T cell, a CD8+ naïve T cell, a central memory T cell, an effector memory T cell, a CD4+ T cell, a stem cell memory T cell, a helper T cell, a regulatory T cell, a cytotoxic T cell, a natural killer T cell, a Hematopoietic Stem Cell, a long term hematopoietic stem cell, a short term hematopoietic stem cell, a multipotent progenitor cell, a lineage restricted progenitor cell, a lymphoid progenitor cell, a myeloid progenitor cell, a common myeloid progenitor cell, an erythroid progenitor cell, a megakaryocyte erythroid progenitor cell, a retinal cell, a photoreceptor cell, a rod cell, a cone cell, a retinal pigmented epithelium cell, a trabecular meshwork cell, a cochlear hair cell, an outer hair cell, an inner hair cell, a pulmonary epithelial cell, a bronchial epithelial cell, an alveolar epithelial cell, a pulmonary epithelial progenitor cell, a striated muscle cell, a cardiac muscle cell, a muscle satellite cell, a neuron, a neuronal stem cell, a mesenchymal stem cell, an induced pluripotent stem (iPS) cell, an embryonic stem cell, a monocyte, a megakaryocyte, a neutrophil, an eosinophil, a basophil, a mast cell, a reticulocyte, a B cell, e.g., a progenitor B cell, a Pre B cell, a Pro B cell, a memory B cell, a plasma B cell, a gastrointestinal epithelial cell, a biliary epithelial cell, a pancreatic ductal epithelial cell, an intestinal stem cell, a hepatocyte, a liver stellate cell, a Kupffer cell, an osteoblast, an osteoclast, an adipocyte, a preadipocyte, a pancreatic islet cell (e.g., a beta cell, an alpha cell, a delta cell), a pancreatic exocrine cell, a Schwann cell, or an oligodendrocyte.

[0183] In embodiments, the cell is in G1 phase: at the time the cell is contacted with one or more of (a), (b), (c), and (d); at the time a Cas9 molecule cleaves a target position, or at the time a Cas9 molecule-mediated break is repaired by HDR. In embodiments, the cell is in S phase: at the time the cell is contacted with one or more of (a), (b), (c), and (d); at the time a Cas9 molecule cleaves a target position, or at the time a Cas9 molecule-mediated break is repaired by HDR.

[0184] In embodiments, the cell is in G2 phase: at the time the cell is contacted with one or more of (a), (b), (c), and (d); at the time a Cas9 molecule cleaves a target position, or at the time a Cas9 molecule-mediated break is repaired by HDR.

[0185] 6. Properties (i)-(xi) and Characterization Thereof

[0186] In some embodiments, one or more of the following properties is present:
[0187] i. the gRNA is configured to position a Cas9 molecule-mediated cleavage event at a preselected position relative to a landmark on the target nucleic acid, wherein the landmark is a site, e.g., a preselected site in the target nucleic acid, wherein the target position or the landmark or both are present on an endogenous chromosomal segment, e.g., are not part of a heterologous reporter gene;
[0188] ii. the Cas9 system further comprises a second gRNA suitable for targeting a Cas9 molecule to the target nucleic acid;
[0189] iii. the gRNA comprises at least one domain of a preselected length, e.g., a length disclosed herein;
[0190] iv. the Cas9 molecule is a protein selected from Table 111.1, e.g., a Cas9 molecule other than a S. pyogenes Cas9 molecule, or a Cas9 molecule, other than an S. pyogenes Cas9 molecule, comprising at least 20, 30, 40, 50, 55, 60, 65, 70, 75, 80, 85, 90, 95, 99, or 100% homology with, or which differs by no more than 1, 2, 3, 4, 5, 6, 7, 8, 9, 10, 15, 20, 25, 30, 35, 40, 35, 50, 55, 60, 65, 70, 75, 80, 85, 90, 95, 100, 150, 200, 250, 300, 350 or 400, amino acid residues from, the amino acid sequence of a reference sequences, e.g., naturally occurring Cas9 molecule, e.g., a Cas9 molecule described in Table 111.1 herein;
[0191] v. the Cas9 system further comprises a second Cas9 molecule;
[0192] vi. the Cas9 molecule is less than about 1300 amino acids in length;
[0193] vii. the Cas9 molecule comprises a heterologous PI domain;
[0194] viii. the Cas9 molecule comprises a REC2 deletion, REC1_{CT} deletion, or a REC1_{SUB} deletion, or any combination thereof;
[0195] ix. the template nucleic acid has a preselected sequence comprising a 5′ homology arm, a replacement sequence, and a 3′ homology arm, wherein the replacement sequence corresponds to an endogenous nucleic acid, e.g., a chromosomal or organellar nucleic acid, e.g., are not part of a heterologous reporter gene; and
[0196] x. the HDR-enhancer molecule is an antibody, e.g., an intrabody, a miRNA, a siRNA, e.g., an siRNA having a modified nucleotide, or an antiMiR.
[0197] xi. the HDR-enhancer molecule is an HDR-enhancing gRNA, e.g., a gRNA molecule designed to down-regulate non-HDR DNA repair pathways including, but not limited to, alt-NHEJ or c-NHEJ (see FIG. 1), or designed to up-regulate HDR DNA repair pathways including, but not limited to, SSA, alt-HR, or HR (see FIG. 1).

[0198] In some embodiments, one or more of properties (i)-(xi) is present. In some embodiments, one or more of properties (i), (ii), (iv), (v), (vi), (vii), (viii), (x) or (xi) is present. In some embodiments, one or more of properties (i), (ii), (v), (vi), (vii), (viii), (x), or (xi) is present.

[0199] In embodiments, the landmark is: (a) the target position, (b) the 5′ end of a target position, (c) the 3′ end of a target position, (d) within a target position, (e) a position on the target nucleic acid that corresponds to: the 5′ end of the replacement sequence; the 3′ end of the replacement sequence; the 5′ end of the template nucleic acid; the 3′ end of the template nucleic acid; within the 5′ homology arm; within the 3′ homology arm; or within the replacement sequence, or (f) an intron/exon boundary, e.g., the intron/exon boundary nearest the target position or within 50, 100 or 200 nucleotides of the target position; (g) in an intron, e.g., the intron nearest to the target position, the intron within which the target position lies, the nearest intron upstream of the target position, the nearest intron downstream of the target position, or an intron within 50, 100, 200, or 500 nucleotides of the target position; (h) in an exon, e.g., the exon nearest to the target position, the exon within which the target position lies, the nearest exon upstream of the target position, the nearest exon downstream of the target position, or an exon within 50, 100, 200, or 500 nucleotides of the target position; (i) the 5′ end of a coding region, e.g., the coding region nearest to the target position, the coding region within which the target position lies, the nearest coding region upstream of the target position, the nearest coding region downstream of the target position, or a coding region within 50, 100, 200, or 500 nucleotides of the target position; (j) the 3′ end of a coding region, e.g., the coding region nearest to the target position, the coding region within which the target position lies, the nearest coding region upstream of the target position, the nearest coding region downstream of the target position, or a coding region within 50, 100, 200, or 500 nucleotides of the target position; (k) within a coding region, e.g., the coding region nearest to the target position, the coding region within which the target position lies, the nearest coding region upstream of the target position, the nearest coding region downstream of the target position, or a coding region within 50, 100, 200, or 500 nucleotides of the target position; (1) the 5′ end of a transcribed region, e.g., the transcribed region nearest to the target position, the transcribed region within which the target position lies, the nearest transcribed region upstream of the target position, the nearest transcribed region downstream of the target position, or a transcribed region within 50, 100, 200, or 500 nucleotides of the target position; (m) the 3′ end of a transcribed region, e.g., the transcribed region nearest to the target position, the transcribed region within which the target position lies, the nearest transcribed region upstream of the target position, the nearest transcribed region downstream of the target position, or a transcribed region within 50, 100, 200, or 500 nucleotides of the target position; (n) within a transcribed region, e.g., the transcribed region nearest to the target position, the transcribed region within which the target position lies, the nearest transcribed region upstream of the target position, the nearest transcribed region downstream of the target position, or a transcribed region within 50, 100, 200, or 500 nucleotides of the target position; (o) the 5′ end of a repeated element, e.g., the repeated element nearest to the target position, the repeated element within which the target position lies, the nearest repeated element upstream of the target position, the nearest repeated element downstream of the target position, or a repeated element within 50, 100, 200, or 500 nucleotides of the target position; (p) the 3′ end of a repeated element, e.g., the repeated element nearest to the target position, the repeated element within which the target position lies, the nearest repeated element upstream of the target position, the nearest repeated element downstream of the target position, or a repeated element within 50, 100, 200, or 500 nucleotides of the target position; or (q) within a repeated element, e.g., the repeated element nearest to the target position, the repeated element within which the target position lies, the nearest repeated element upstream of the target position, the nearest repeated element downstream of the target position, or a repeated element within 50, 100, 200, or 500 nucleotides of the target position.

[0200] In embodiments, the target position is in a naturally occurring fusion protein, e.g., an oncogenic fusion of two genes, e.g., BCR-ABL, TEL-AML1, AML1-ETO, or TMPRSS2-ERG. In some embodiments, the target position is in a gene, e.g., a naturally occurring gene, e.g., a gene that is wild-type or is carrying a naturally-occurring mutation.

[0201] In embodiments, the preselected position is selected from at the landmark, away from the landmark; within 50, 100, 150, or 200 nucleotides of the landmark; at least 10, 20, 30, 40, or 50 nucleotides away from the landmark; and 10 to 200, 20-200, 30-200, 40-200, 50-200, 10-150, 10-100, or 10-50 nucleotides from the landmark.

[0202] In embodiments, the landmark is a target position and the preselected position is selected from: at the landmark, away from the landmark; within 50, 100, 150, or 200 nucleotides of the landmark; at least 10, 20, 30, 40, or 50 nucleotides away from the landmark; and 10 to 200, 20-200, 30-200, 40-200, 50-200, 10-150, 10-100, or 10-50 nucleotides from the landmark.

[0203] In embodiments, the at least one domain of a preselected length is a targeting domain which is 12-30 nucleotides in length. In some embodiments, the at least one domain of a preselected length is a targeting domain which is at least 21 nucleotides in length, e.g., 21-30 nucleotides in length. In embodiments, the at least one domain of a preselected length is a domain encompassing the proximal domain and the tail domain, which taken together are at least 15, 18, 20, 25, 30, 31, 35, 40, 45, 49, 50, or 53 nucleotides in length.

[0204] In embodiments, the 5′ homology arm or 3′ homology arm, each independently has, or both have, a length of: at least 50, 100, 250, 500, 750, 1000, 2000, 3000, 4000, or 5000 nucleotides; no more than 50, 100, 250, 500, 750, 1000, 2000, 3000, 4000, or 5000 nucleotides; or between 50-100, 100-250, 250-500, 500-750, 750-1000, 1000-2000, 2000-3000, 3000-4000, or 4000-5000 nucleotides. In some embodiments, a 5′ or 3′ homology arm of a ssDNA template nucleic acid is 60-200 nucleotides. In some embodiments, a 5′ or 3′ homology arm of a dsDNA template nucleic acid is 500-4000 nucleotides. In embodiments, the 5′ homology arm has a 5′ end and a 3′ end and: the 5′ end is at least 50, 100, 250, 500, 750, 1000, 2000, 3000, 4000, or 5000 nucleotides from the target position, the 5′ end is no more than 50, 100, 250, 500, 750, 1000, 2000, 3000, 4000, or 5000 nucleotides from the target position, the 5′ end between 50-100, 100-250, 250-500, 500-750, 750-1000, 1000-2000, 2000-3000, 3000-4000, or 4000-5000 nucleotides from the target position, the 3′ end is at least 50, 100, 250, 500, 750, 1000, 2000, 3000, 4000, or 5000 nucleotides from the target position, the 3′ end is no more than 50, 100, 250, 500, 750, 1000, 2000, 3000, 4000, or 5000 nucleotides from the target position, or the 3′ end between 50-100, 100-250, 250-500, 500-750, 750-1000, 1000-2000, 2000-3000, 3000-4000, or 4000-5000 nucleotides from the target position. In embodiments, the 3′ homology arm has a 5′ end and a 3′ end and: the 5′ end is at least 50, 100, 250, 500, 750, 1000, 2000, 3000, 4000, or 5000 nucleotides from the target position, the 5′ end is no more than 50, 100, 250, 500, 750, 1000, 2000, 3000, 4000, or 5000 nucleotides from the target position, the 5′ end between 50-100, 100-250, 250-500, 500-750, 750-1000, 1000-2000, 2000-3000, 3000-4000, or 4000-5000 nucleotides from the target position, the 3′ end is at least 50, 100, 250, 500, 750, 1000, 2000, 3000, 4000, or 5000 nucleotides from the target position, the 3′ end is no more than 50, 100, 250, 500, 750, 1000, 2000, 3000, 4000, or 5000 nucleotides from the target position, or the 3′ end between 50-100, 100-250, 250-500, 500-750, 750-1000, 1000-2000, 2000-3000, 3000-4000, or 4000-5000 nucleotides from the target position. In embodiments, the replacement sequence has a length of: at least 1, 2, 3, 5, 10, 20, 50, 100, or 200 nucleotides, no more than 2, 3, 5, 10, 20, 50, 100, 200, or 500 nucleotides, or between 1-3, 1-5, 1-10 10-20, 20-50, 50-100, 100-200, or 200-500 nucleotides.

[0205] 7. Further Method Steps

[0206] In embodiments, the method comprises contacting the cell with a Cas9 system as described herein. In embodiments, the method comprises contacting the cell with a vector as described herein. In embodiments, altering the structure of a cell comprises altering the structure of a target nucleic acid of the cell. In embodiments, the sequence of the target nucleic acid is altered. In embodiments, a deletion is created in the target nucleic acid. In embodiments, a mutant or disease phenotype is converted to a non-mutant or non-disease phenotype.

[0207] In embodiments, altering the structure of the target nucleic acid comprises HDR-mediated repair, such as alt-HR mediated repair, SSA-mediated repair, or HR-mediated repair. In embodiments, the efficiency of HDR is increased over the level seen in the absence of an HDR-enhancer. In embodiments, altering the structure of the target nucleic acid comprises creating a break in the target nucleic acid, e.g., a single or double strand break. In embodiments, the double strand break is blunt-ended or comprises one or two overhangs. In embodiments, altering the structure of the target nucleic acid comprises resection, e.g., at a single or double strand break.

[0208] In embodiments, the chromatin at the target nucleic acid is altered. In embodiments, the method further comprises assaying cell chromatin state of the cell, e.g., chromatin state of the target nucleic acid.

[0209] In embodiments, the method further comprises assaying cell cycle status of the cell, e.g., determining whether the cell is in G2 phase.

[0210] In embodiments, the method further comprises contacting the cell with an additional one or more HDR-enhancers, e.g., contacting the cell with exactly two or exactly three HDR-enhancers. In embodiments, the HDR-enhancer and the additional HDR-enhancer (i) up-regulate the same pathway, or (ii) down-regulate the same pathway.

[0211] In embodiments, the method further comprises contacting the cell with a second gRNA. In embodiments, the gRNA guides the Cas9 molecule to produce a first break, and a second gRNA guides a second Cas9 molecule to produce a second break. In embodiments, the first break is a single strand break and the second break is a single strand break, the first break is a single strand break and the second break is a double strand break, the first break is a double strand break and the second break is a single strand break, or the first break is a double strand break and the second break is a double strand break.

[0212] In embodiments, the method further comprises contacting the cell with a second Cas9 molecule. In embodiments, the Cas9 molecule is a nickase and the second Cas9 molecule is a nickase; the Cas9 molecule can catalyze a double strand break and the second Cas9 molecule is a nickase; the Cas9 molecule is a nickase and the second Cas9 molecule can catalyze a double strand break; or the Cas9 molecule can catalyze a double strand break and the second Cas9 molecule can catalyze a double strand break.

[0213] In embodiments, the gRNA targets the Cas9 molecule to make a first break and a second gRNA targets a second Cas9 molecule to make a second break. In embodiments, the two breaks are positioned: within 55 nucleotides of one another; at least 25 nucleotides apart; or within 25-65 nucleotides of one another. In embodiments, the first break is a single strand break and the second break is a single strand break; the first break is a single strand break and the second break is a double strand break; the first break is a double strand break and the second break is a single strand break; or the first break is a double strand break and the second break is a double strand break. In embodiments, the Cas9 molecule targeted by the gRNA has the same structure, e.g., amino acid sequence, as the Cas9 molecule targeted by the second gRNA. In embodiments, the Cas9 molecule targeted by the gRNA has a different structure, e.g., amino acid sequence, as the Cas9 molecule targeted by the second gRNA. In embodiments, the Cas9 molecule creates a first break in at a first target position and the second Cas9 molecule creates a second break at a second target position.

[0214] In embodiments, the method forms a double-stranded break that is blunt-ended. In embodiments, the method forms a double strand break that comprises one or two overhangs.

[0215] In embodiments, the method further comprises contacting the cell with a cell cycle arrest agent. In embodiments, the cell cycle arrest agent arrests cells in G2. In embodiments, the cell cycle arrest agent is a Cdk1 inhibitor. In embodiments, the cell cycle arrest agent is not a Cdk1 inhibitor. In embodiments, the cell cycle arrest agent is an agent of Table VIII.

[0216] In embodiments, the method further comprises a step of removing the cell from a subject's body before contacting the cell with the gRNA, the Cas9 molecule, the template nucleic acid, and the HDR-enhancer. In embodiments, the method further comprises a step of returning the cell to the subject's body after contacting the cell with the gRNA, the Cas9 molecule, the template nucleic acid, and the HDR-enhancer. In embodiments, the method further comprises a step of placing the cell in a subject's body after contacting the cell with the gRNA, the Cas9 molecule, the template nucleic acid, and the HDR-enhancer.

[0217] In embodiments, contacting the cell with the gRNA comprises contacting the cell with DNA comprising the sequence of the gRNA, and allowing the cell to produce gRNA. In embodiments, contacting the cell with the Cas9 molecule comprises contacting the cell with a nucleic acid (e.g., DNA or RNA) encoding the Cas9 molecule, and allowing the cell to produce the Cas9 molecule. In embodiments, contacting the cell with the HDR-enhancer comprises contacting the cell with a nucleic acid (e.g., DNA or RNA) encoding the HDR-enhancer, and allowing the cell to produce the HDR-enhancer. In embodiments, contacting the cell with the Cas9 molecule, the gRNA, the template nucleic acid, and the HDR-enhancer comprises contacting the cell with a recombinant nucleic acid that comprises or encodes two of the Cas9 molecule, the gRNA, the template nucleic acid, and the HDR-enhancer, e.g., encodes the Cas9 molecule and encodes or comprises the gRNA, encodes the Cas9 molecule and comprises the template nucleic acid, encodes the Cas9 molecule and encodes or comprises the HDR-enhancer, encodes or comprises the gRNA and comprises the template nucleic acid, encodes or comprises the gRNA and encodes or comprises the HDR-enhancer, or comprises the template nucleic acid and encodes or comprises the HDR-enhancer, and allowing the cell to produce the two of the Cas9 molecule, the gRNA the template nucleic acid, and the HDR-enhancer. In embodiments, contacting the cell with the Cas9 molecule, the gRNA, the template nucleic acid, and the HDR-enhance comprises contacting the cell with a recombinant nucleic acid that comprises or encodes at least three, e.g., all, of the Cas9 molecule, the gRNA, the template nucleic acid, and the HDR-enhancer, e.g.: encodes the Cas9 molecule, encodes or comprises the gRNA, and comprises the template nucleic acid; encodes the Cas9 molecule, encodes or comprises the gRNA, and encodes or comprises the HDR-enhancer; encodes the Cas9 molecule, comprises the template nucleic acid, and encodes or comprises the HDR-enhancer; encodes or comprises the gRNA, comprises the template nucleic acid, and encodes or comprises the HDR-enhancer, or encodes the Cas9 molecule, encodes or comprises the gRNA, comprises the template nucleic acid, and encodes or comprises the HDR-enhancer, and allowing the cell to produce the gRNA and the Cas9 molecule.

[0218] In embodiments, the cell is contacted with the HDR-enhancer after being contacted with one or more of the gRNA, the Cas9 molecule, and the template nucleic acid. In embodiments, the cell is contacted with the HDR-enhancer before being contacted with one or more of the gRNA, the Cas9 molecule, and the template nucleic acid. In embodiments, the cell is contacted with the gRNA, the Cas9 molecule, the template nucleic acid, and the HDR-enhancer at substantially the same time. In embodiments, the cell is contacted with the gRNA and the Cas9 molecule at substantially the same time.

[0219] In embodiments, the target position is altered to take the sequence of at least a portion of the template nucleic acid, e.g., the replacement sequence or a portion thereof.

[0220] In embodiments, administering the gRNA comprises administering DNA encoding the gRNA; administering the Cas9 molecule comprises administering DNA or RNA encoding the Cas9 molecule; or administering the gRNA and Cas9 molecules comprises administering a recombinant nucleic acid that encodes both the gRNA and the Cas9 molecule, or any combination thereof.

[0221] In embodiments, the HDR-enhancer molecule is administered separately from the gRNA or the Cas9 molecule.

[0222] In embodiments, the method comprises a step of removing the cell from a subject's body before contacting the cell with the gRNA, the Cas9 molecule, the template nucleic acid, and the HDR-enhancer, and further comprising a step of returning the cell to the subject's body after contacting the cell with the gRNA, the Cas9 molecule, the template nucleic acid, and the HDR-enhancer.

[0223] In embodiments, only one DNA repair pathway is substantially down-regulated or only one inhibitor is contacted with the cell. In embodiments, two DNA repair pathways are substantially downregulated when only one inhibitor is contacted with the cell. In embodiments, three DNA repair pathways are substantially downregulated when only one inhibitor is contacted with the cell.

[0224] In embodiments, the cell is in G1 phase: at the time the cell is contacted with the Cas9 system at the time a Cas9 molecule cleaves a target position, or at the time a Cas9 molecule-mediated break is repaired by HDR. In embodiments, the cell is in S phase: at the time the cell is contacted with the Cas9 system; at the time a Cas9 molecule cleaves a target position, or at the time a Cas9 molecule-mediated break is repaired by HDR.

[0225] 8. Characteristics of the Subject

[0226] In embodiments, the subject has a disorder that is caused by a target position in a target nucleic acid. In embodiments, the disorder is cancer, a genetic disease, an infectious disease, a disorder caused by aberrant mtDNA, a metabolic disease, a disorder caused by aberrant cell cycle, a disorder caused by aberrant angiogenesis, a disorder caused by aberrant DNA damage repair, or a pain disorder. In one embodiment, the subject is a human subject.

[0227] 9. Characteristics of Nucleic Acid Compositions

[0228] In embodiments, the Cas9 system comprises one or more of: a nucleic acid encoding a gRNA suitable for targeting a Cas9 molecule to a target nucleic acid in a cell; a nucleic acid encoding a Cas9 molecule; and a nucleic acid that encodes the HDR-enhancer.

[0229] In embodiments, nucleic acid encoding a gRNA suitable for targeting a Cas9 molecule to a target nucleic acid in a cell is DNA. In embodiments, the nucleic acid encoding a Cas9 molecule is DNA. In embodiments, the nucleic acid that encodes the HDR-enhancer molecule is DNA. In embodiments, the Cas9 system comprises a template nucleic acid, which template nucleic acid is optionally DNA.

[0230] In embodiments, the composition further comprises a nucleic acid that comprises or encodes a second gRNA. In embodiments, the composition further comprises a nucleic acid that encodes a second Cas9 molecule. In embodiments, the composition further comprises a nucleic acid that comprises or encodes a second HDR-enhancer. In embodiments, the composition further comprises a nucleic acid that comprises or encodes a third HDR-enhancer.

[0231] In embodiments, the HDR-enhancer molecule is a protein. In embodiments, the HDR-enhancer molecule is an RNA. In other embodiments, the HDR-enhancer molecule is an HDR-enhancing gRNA molecule.

[0232] In embodiments, each nucleic acid is a DNA. In embodiments, the nucleic acid molecule encoding the gRNA molecule, and the nucleic acid molecule encoding the Cas9 molecule are disposed on a single nucleic acid molecule. In other embodiments, the nucleic acid molecule encoding the gRNA molecule, and the nucleic acid molecule encoding the Cas9 molecule are disposed on separate nucleic acid molecules. In one embodiment, the nucleic acid molecule encoding the gRNA molecule, and the nucleic acid molecule encoding the template nucleic acid are disposed on a single nucleic acid molecule. In one embodiment, the nucleic acid molecule encoding the gRNA molecule, and the nucleic acid molecule encoding the template nucleic acid are disposed on separate nucleic acid molecules. In another embodiment, the nucleic acid encoding the Cas9 molecule and the nucleic acid encoding the template nucleic acid are disposed on a single nucleic acid molecule. In another embodiment, the nucleic acid encoding the Cas9 molecule and the nucleic acid encoding the template nucleic acid are disposed on separate nucleic acid molecules. In another embodiment, the nucleic acid encoding the gRNA molecule, the nucleic acid encoding the Cas9 molecule, and the template nucleic acid are disposed on a single nucleic acid molecule. In another embodiment, the nucleic acid encoding the gRNA molecule and the nucleic acid encoding the Cas9 molecule are disposed on a single nucleic acid molecule and the template nucleic acid is disposed on a separate nucleic acid molecule. In another embodiment, the nucleic acid encoding the gRNA molecule and the template nucleic acid are disposed on a single nucleic acid molecule and the nucleic acid encoding the Cas9 molecule is disposed on a separate nucleic acid molecule. In another embodiment, the nucleic acid encoding the Cas9 molecule and the template nucleic acid are disposed on a single nucleic acid molecule and the nucleic acid encoding the gRNA molecule is disposed on a separate nucleic acid molecule. In yet another embodiment, the nucleic acid encoding the gRNA molecule, the nucleic acid encoding the Cas9 molecule, and the template nucleic acid are each disposed on separate nucleic acid molecules.

[0233] In embodiments, each nucleic acid forms part of a single nucleic acid molecule. In embodiments, each nucleic acid forms part of a single circular double stranded DNA. In embodiments, each nucleic acid forms part of a linear double stranded DNA.

[0234] In embodiments, the composition is a purified composition.

[0235] 10. Additional Characteristics

[0236] In one embodiment, described herein is a cell comprising a Cas9 system described herein. In one embodiment, described herein is a population of cells, each of which comprise a Cas9 system described herein. In one embodiment, described herein is a kit comprising a Cas9 system described herein. In one embodiment, the kit comprises a composition described herein. In another embodiment, the kit comprises a cell or a population of cells described herein.

[0237] In one embodiment, described herein is a composition comprising a Cas9 system. In embodiments, the composition further comprises a pharmaceutically acceptable excipient. In embodiments, the gRNA molecule and the Cas9 molecule form part of a single admixture or are provided separately; the gRNA molecule and the HDR-enhancer molecule form part of a single admixture or are provided separately; the gRNA molecule and the template nucleic acid form part of a single admixture or are provided separately; the Cas9 molecule and the HDR-enhancer molecule form part of a single admixture or are provided separately; the Cas9 molecule and the template nucleic acid form part of a single admixture or are provided separately; the HDR-enhancer molecule and the template nucleic acid form part of a single admixture or are provided separately; the gRNA molecule, the Cas9 molecule, and the HDR-enhancer molecule form part of a single admixture or are provided separately; the gRNA molecule, the Cas9 molecule, and the template nucleic acid form part of a single admixture or are provided separately; the Cas9 molecule, the HDR-enhancer molecule, and the template nucleic acid form part of a single admixture or are provided separately; or the gRNA molecule, the Cas9 molecule, the HDR-enhancer molecule, and the template nucleic acid form part of a single admixture or are provided separately.

[0238] In embodiments, the Cas9 system comprises a kit. The kit may further comprise packaging. The kit may further comprise instructions for use to treat a disorder, e.g., a disorder caused by a target position in a target nucleic acid. In embodiments, the gRNA molecule and the Cas9 molecule form part of a single admixture or are provided separately; the gRNA molecule and the HDR-enhancer molecule form part of a single admixture or are provided separately; the gRNA molecule and the template nucleic acid form part of a single admixture or are provided separately; the Cas9 molecule and the HDR-enhancer molecule form part of a single admixture or are provided separately; the Cas9 molecule and the template nucleic acid form part of a single admixture or are provided separately; the HDR-enhancer molecule and the template nucleic acid form part of a single admixture or are provided separately; the gRNA molecule, the Cas9 molecule, and the HDR-enhancer molecule form part of a single admixture or are provided separately; the gRNA molecule, the Cas9 molecule, and the template nucleic acid form part of a single admixture or are provided separately; the Cas9 molecule, the HDR-enhancer molecule, and the template nucleic acid form part of a single admixture or are provided separately; or the gRNA molecule, the Cas9 molecule, the HDR-enhancer molecule, and the template nucleic acid form part of a single admixture or are provided separately.

[0239] In embodiments, the Cas9 system further comprises a cell cycle arrest agent. The cell cycle arrest agent may be capable of arresting cells in G2 phase. In embodiments, the cell cycle arrest agent is a Cdk1 inhibitor. In embodiments, the inhibitor is an HDR-enhancing gRNA molecule, a small molecule, an siRNA, or an antibody, e.g., intrabody, directed against Cdk1. In embodiments, the cell cycle arrest agent is not a Cdk1 inhibitor.

[0240] In embodiments, one or a plurality of components, e.g., the gRNA molecule and the template nucleic acid, are provided as a single admixture. In embodiments, one or a plurality of components, e.g., the gRNA molecule and the template nucleic acid, are each provided separately from one another, e.g., as different solutions.

[0241] The disclosure contemplates all combinations of any one or more of the foregoing aspects and/or embodiments, as well as combinations with any one or more of the embodiments set forth in the detailed description and examples.

[0242] Unless otherwise defined, all technical and scientific terms used herein have the same meaning as commonly understood by one of ordinary skill in the art to which this invention belongs. Although methods and materials similar or equivalent to those described herein can be used in the practice or testing of the present invention, suitable methods and materials are described below. All publications, patent applications, patents, and other references mentioned herein are incorporated by reference in their entirety. In addition, the materials, methods, and examples are illustrative only and not intended to be limiting.

[0243] Headings, including numeric and alphabetical headings and subheadings, are for organization and presentation and are not intended to be limiting.

[0244] Other features and advantages of the invention will be apparent from the detailed description, drawings, and from the claims.

### BRIEF DESCRIPTION OF THE DRAWINGS

[0245] The drawings are first briefly described.

[0246] FIG. 1 is a model representing the DNA repair pathways activated in response to a double-stranded break (DSB).

[0247] FIG. 2 is a cartoon depicting the different Cas9 variants and their positioning using a single gRNA or dual gRNAs.

[0248] FIG. 3 is a graph depicting that a Cas9 mutated in the RUVC domain with a PAM in the opposite orientation leaves a 5′ protruding end that is more prone to be engaged in HR (gene conversion) in the absence of a donor template nucleic acid. The data is a representation of at least four independent experiments with a minimum of 350 reads per condition.

[0249] FIG. 4 is a graph depicting that a Cas9 mutated in the RUVC domain with a Pam facing in the opposite orientation leaves a 5′ protruding end that is more prone to be engaged in HDR in the presence of a single-stranded oligonucleotide donor template nucleic acid. The data is a representation of at least four independent experiments with a minimum of 350 reads per condition.

[0250] FIG. 5 is a graph depicting that 60% of the gene editing events using wild-type Cas9 (black) resolve in small deletions, typically a signature of c-NHEJ.

[0251] FIG. 6 is a graph depicting that double strand breaks (DSB) generated by wild-type Cas9 are predominantly repaired by canonical NHEJ (c-NHEJ).

[0252] FIGS. 7A and 7B are graphs depicting that the down-regulation of Artemis leads to an increase in gene correction mediated by a single-stranded oligonucleotide donor (ss-ODN). FIG. 7A depicts a western blot showing down-regulation of Artemis. FIG. 7B depicts quantification of the gene conversion using a single stranded oligonucleotide donor, wild-type Cas9, and gRNAs HBB-8 and HBB-15 against the HBB locus.

[0253] FIG. 8 is a western blot showing the down-regulation of Rad80 using siRNA.

[0254] FIG. 9 is a model depicting that double-stranded breaks generated by the N863A Cas9 mutant are predominantly are paired by Alt-NHEJ.

[0255] FIG. 10 is a graph depicting that the down-regulation of Pol Theta leads to an increase in gene conversion and a decrease in insertions.

[0256] FIG. 11 is a model depicting that double-stranded breaks generated by the D10A Cas9 mutant are predominantly repaired by HR.

[0257] FIGS. 12A and 12B depict that gene conversions and non-gene correction is dependent on HR. Specifically, FIG. 12A is a western blot showing BRAC2 and Rad51 down-regulation. FIG. 12B is a graph depicting the percentage of modification observed in U2OS cells edited at the HBB locus with D10A Cas9 and 2 gRNAs with or without BRCA2 or Rad51. FF is a negative control.

[0258] FIGS. 13A and 13B demonstrate that gene correction is dependent on SSA. FIG. 13A is a Western blot showing down-regulation of Rad52 and ERCC1. FIG. 13B is a graph depicting the effect of down-regulation of Rad52 and ERCC1 on gene correction at the HBB locus in response to a 5′ protruding double strand break generated with the D10A Cas9 mutant.

[0259] FIGS. 14A and 14B depict that gene conversion is dependent on EXO1. The left panel of FIG. 14A is a western blot panel showing down-regulation of EXO1 with siRNA. The right panel of FIG. 14A is a western blot showing the levels of Exo1 in cell lines that have been generated by expression of the gRNA and S.a. FIG. 14B shows two graphs depicting the effect of the down-regulation of Exo1 on gene conversion in response to a 5′ protruding double-stranded break generated with the D10A Cas9 mutant.

[0260] FIG. 15 is a model depicting the inhibition of chromatin modification.

### DEFINITIONS

[0261] “Altered PI domain”, as that term is used herein, refers to a PAM-interacting (PI) domain other than the native or endogenous PI domain associated with the naturally occurring Cas9 molecule. For example, a Cas9 molecule comprises an altered PI domain if its PI domain is other than the PI domain naturally associated with the Cas9 core domain of the Cas9 molecule, or if its PI domain is not a naturally occurring PI domain associated with any Cas9 molecule. (Derived, as used in this sense, is not limited to physical derivation or even derivation from a specific source, and does not require a process limitation, but in an embodiment, includes mere structural similarity). An altered PI domain may have less than 99, 98, 97, 96, 95, 94, 93, 92, 91, 90, 89, 88, 87, 86, 85, 84, 83, 82, 81, 80, 70, 60, 50, 30, 40, 30, 20, or 10% homology with the native or endogenous PI domain of a subject naturally occurring Cas9 molecule from which the Cas9 core domain is derived. An altered PI domain may have a different RKR motif (the PAM recognition sequence) than that of the native or endogenous PI domain of the Cas9 species that supplies the Cas9 core domain. The RKR motif of an altered PI domain may differ from the RKR motif of the native or endogenous PI domain of the Cas9 core domain by 1, 2, or 3 residues. The RKR motif of the altered PI differs at the first position, the second position, the third position, the first and second positions, the first and third positions, the second and third positions, or all three positions, from the RKR motif of the PI endogenous to or naturally associated with the Cas9 core domain. In an embodiment, an altered PI domain is one having greater homology with the PI domain of a reference or donor naturally occurring Cas9 molecule (a heterologous Cas9) that with the native PI domain of a subject Cas9.

[0262] “ALT-HR” or “alternative HR”, or alternative homology repair pathway, as used herein, refers to the process of repairing DNA damage using a homologous nucleic acid (e.g., a sister chromatid or an exogenous nucleic acid, e.g., a template nucleic acid). ALT-HR is distinct from HR in that the process utilizes different pathways from canonical HR, and can be inhibited by the HR mediators, RAD51 and BRCA2. Also, ALT-HR uses a single-stranded or nicked homologous nucleic acid for repair of the break.

[0263] “ALT-NHEJ” or “alternative NHEJ”, or alternative non-homologous end joining, as used herein, is a type of alternative end joining repair process, and utilizes a different pathway than that of canonical NHEJ. In alternative NHEJ, a small degree of resection occurs at the break ends on both sides of the break to reveal single-stranded overhangs. Ligation or annealing of the overhangs results in the deletion of sequence. ALT-NHEJ is a category that includes microhomology-mediated end joining (MMEJ), blunt end joining (EJ), and SD-MMEJ (see FIG. 1). In MMEJ, microhomologies, or short spans of homologous sequences, e.g., 5 nucleotides or more, on the single-strand are aligned to guide repair, and leads to the deletion of sequence between the microhomologies.

[0264] “Amino acids” as used herein encompasses the canonical amino acids as well as analogs thereof.

[0265] “Amino acid residues that flank a deletion”, as that phrase is used herein, refers to the amino acid residue that immediately precedes the deletion and the amino acid residue that immediately follows the deletion. By way of example, in a sequence _{CT}1-_{CT}2-_{CT}3-_{CT}7-_{CT}8-_{CT}9, wherein _{CT}4-_{CT}5-_{CT}6 is deleted, the flanking amino acid residues are, _{CT}3 and _{CT}7.

[0266] As used herein, an agent that promotes cell cycle “arrest” refers to an agent that causes a cell to cease dividing and to remain in a characteristic phase of the cell cycle. For instance, the agent may cause the cell to arrest in G1 or G2. In embodiments, the agent produces a reversible cell cycle arrest, such that the cell resumes dividing once the agent is withdrawn.

[0267] “Canonical NHEJ”, or canonical non-homologous end joining, as used herein, refers to the process of repairing double strand breaks in which the break ends are directly ligated. This process does not require a homologous nucleic acid to guide the repair, and can result in deletion or insertion of one or more nucleotides. This process requires the Ku heterodimer (Ku70/Ku80), the catalytic subunit of DNA-PK (DN-PKcs), and/or DNA ligase XRCC4/LIG4.

[0268] “Cas9 molecule,” as that term is used herein, refers to a Cas9 polypeptide or a nucleic acid encoding a Cas9 polypeptide. A Cas9 polypeptide is a polypeptide that can bind (1) a PAM (a protospacer adjacent motif) in a nucleic acid and (2) a guide RNA (gRNA) molecule. In an embodiment, in concert with the gRNA molecule, a Cas9 polypeptide can localize to a site which comprises a target domain.

[0269] A Cas9 molecule may be a nuclease (an enzyme that cleaves both strands of a double-stranded nucleic acid), a nickase (an enzyme that cleaves one strand of a double-stranded nucleic acid), or an enzymatically inactive (or dead) Cas9 molecule. A Cas9 molecule having nuclease or nickase activity is referred to as an “enzymatically active Cas9 molecule” (an “eaCas9” molecule). A Cas9 molecule lacking the ability to cleave target nucleic acid is referred to as an “enzymatically inactive Cas9 molecule” (an “eiCas9” molecule). A Cas9 molecule can have the amino acid sequence of a naturally occurring Cas9 molecule or can be an altered, engineered or modified Cas9 molecule, which differs by at least one amino acid residue, from a reference sequence, e.g., the most similar naturally occurring Cas9 molecule, e.g., a Cas9 molecule from Table 111.1. (The terms altered, engineered or modified, as used in this context, refer merely to a difference from a reference or naturally occurring sequence, and impose no specific process or origin limitations.) A Cas9 molecule may be a Cas9 polypeptide or a nucleic acid encoding a Cas9 polypeptide.

[0270] In an embodiment, a Cas9 molecule meets one or both of the following criteria: it has at least 20, 30, 40, 50, 55, 60, 65, 70, 75, 80, 81, 82, 83, 84, 85, 86, 87, 88, 89, 90, 91, 92, 93, 94, 95, 96, 97, 98, 99, or 100% homology with, or it differs by no more than 1, 2, 3, 4, 5, 6, 7, 8, 9, 10, 11, 12, 13, 14, 15, 16, 17, 18, 19, 20, 25, 30, 35, 40, 35, 50, 55, 60, 65, 70, 75, 80, 85, 90, 95, 100, 150, 200, 250, 300, 350 or 400, amino acid residues from, the amino acid sequence of a reference sequences, e.g., naturally occurring Cas9 molecule, e.g., a Cas9 molecule described in Table 111.1 herein.

[0271] In one embodiment, the Cas9 molecule may be a Cas9 deletion, e.g., the Cas9 may comprise a deletion in one or more of the following domains: a REC2, REC1_{CT}, or REC1SUB domain, and optionally, a linker disposed between the amino acids flanking the deletion. Except for any REC deletion and associated linker, a Cas9 molecule meets one or both of the following criteria: it has at least 20, 30, 40, 50, 55, 60, 65, 70, 75, 80, 81, 82, 83, 84, 85, 86, 87, 88, 89, 90, 95, 99, or 100% homology with, or it differs by no more than 1, 2, 3, 4, 5, 6, 7, 8, 9, 10, 11, 12, 13, 14, 15, 16, 17, 18, 19, 20, 25, 30, 35, 40, 35, 50, 55, 60, 65, 70, 75, 80, 85, 90, 95, 100, 150, 200, 250, 300, 350 or 400, amino acid residues from, the amino acid sequence of a reference sequences, e.g., naturally occurring Cas9 molecule, e.g., a Cas9 molecule described in Table 111.1 herein. Homology except for any REC deletion is determined as follows: a sequence having a deletion is altered by replacing the deleted sequence with the corresponding sequence from the reference sequence, and the altered sequence is compared with the reference sequence.

[0272] In another embodiment, the Cas9 molecule may be a Cas9 variant, e.g., the Cas9 molecule may comprise an altered PI domain, or other modified amino acid sequence, or the Cas9 molecule may comprise a linker. In an alternate embodiment, except for an altered PI domain or other modified amino acid sequence, a Cas9 molecule meets one or both of the following criteria: it has at least 20, 30, 40, 50, 55, 60, 65, 70, 75, 80, 81, 82, 83, 84, 85, 86, 87, 88, 89, 90, 91, 92, 93, 94, 95, 96, 97, 98, 99, or 100% homology with, or it differs by no more than 1, 2, 3, 4, 5, 6, 7, 8, 9, 10, 11, 12, 13, 14, 15, 16, 17, 18, 19, 20, 25, 30, 35, 40, 35, 50, 55, 60, 65, 70, 75, 80, 85, 90, 95, 100, 150, 200, 250, 300, 350 or 400, amino acid residues from, the amino acid sequence of a reference sequences, e.g., naturally occurring Cas9 molecule, e.g., a Cas9 molecule described in Table 111.1 herein. Homology except for an altered PI domain, or other modified amino acid sequence is determined as follows: a sequence having an altered PI domain (or other modified amino acid sequence) is altered by restoring the altered PI domain (or other modified amino acid sequence) to the naturally occurring PI domain (or other naturally occurring sequence) from the reference sequence, and the thus altered sequence is compared with the reference sequence.

[0273] In an alternate embodiment, except for a linker, a Cas9 molecule meets one or both of the following criteria: it has at least 20, 30, 40, 50, 55, 60, 65, 70, 75, 80, 81, 82, 83, 84, 85, 86, 87, 88, 89, 90, 91, 92, 93, 94, 95, 96, 97, 98, 99, or 100% homology with, or it differs by no more than 1, 2, 3, 4, 5, 6, 7, 8, 9, 10, 11, 12, 13, 14, 15, 16, 17, 18, 19, 20, 25, 30, 35, 40, 35, 50, 55, 60, 65, 70, 75, 80, 85, 90, 95, 100, 150, 200, 250, 300, 350 or 400, amino acid residues from, the amino acid sequence of a reference sequences, e.g., naturally occurring Cas9 molecule, e.g., a Cas9 molecule described in Table 111.1 herein. Homology except for a linker is determined as follows: a sequence having a linker is altered by omitting the linker sequence, and the thus altered sequence is compared with the reference sequence.

[0274] In another embodiment, each domain of the Cas9 molecule (e.g., the domains named herein), including any remaining portion of a REC2, REC1_{CT}, or REC1_{SUB} domain having a deletion or an unaltered portion of a PI domain, will, independently have: at least 20, 30, 40, 50, 55, 60, 65, 70, 75, 80, 81, 82, 83, 84, 85, 86, 87, 88, 89, 90, 91, 92, 93, 94, 95, 96, 97, 98, 99, or 100% homology with such a domain described herein, e.g., in a species of Table III.1. In an embodiment at least 1, 2, 3, 4, 5, of 6 domains will have, independently, at least 50, 60, 70, 80, 81, 82, 83, 84, 85, 86, 87, 88, 89, 90, 91, 92, 93, 94, 95, 96, 97, 98, 99, or 100% homology with a corresponding domain, while any remaining domains will be absent, or have less homology to their corresponding naturally occurring domains.

[0275] In one embodiment, the Cas9 molecule is a S. pyogenes Cas9 variant. In certain embodiments, the Cas9 variant is the EQR variant. In certain embodiments, the Cas9 variant is the VRER variant. In certain embodiments, the eiCas9 molecule is a S. pyogenes Cas9 variant. In certain embodiments, the Cas9 variant is the EQR variant. In certain embodiments, the Cas9 variant is the VRER variant. In certain embodiments, a Cas9 system comprises a Cas9 molecule, e.g., a Cas9 molecule described herein, e.g., the Cas9 EQR variant or the Cas9 VRER variant.

[0276] In some embodiments, the Cas9 molecule is a S. aureus Cas9 variant. In certain embodiments, the Cas9 variant is the KKH (E782K/N968K/R1015H) variant (see Kleinstiver et al. (2015) NAT. BIOTECHNOL. doi: 10.1038/nbt.3404, the entire contents of which are expressly incorporated herein by reference). In some embodiments, the Cas9 variant is the E782K/K929R/R1015H variant (see Kleinstiver et al. (2015)). In some embodiments, the Cas9 variant is the E782K/K929R/N968K/R1015H variant (see Kleinstiver et al. (2015). In some embodiments the Cas9 variant comprises one or more mutations in one of the following residues: E782, K929, N968, R1015. In some embodiments the Cas9 variant comprises one or more of the following mutations: E782K, K929R, N968K, R1015H and R1015Q (see Kleinstiver et al. (2015)). In certain embodiments, a Cas9 system comprises a Cas9 molecule, e.g., a Cas9 molecule described herein, e.g., the Cas9 KKH variant.

[0277] “Cas9 polypeptide”, as that term is used herein, also refers to a polypeptide having at least 80%, 85%, 90%, 95%, 96%, 97%, 98%, 99%, or 100% homology with a reference Cas9 molecule, e.g., a Cas9 molecule of Table 111.1. A Cas9 polypeptide can be enzymatically active (an eaCas9 polypeptide), or can lack the ability to cleave a target nucleic acid (an eiCas9 polypeptide).

[0278] “Cas9 core domain”, as that term is used herein, refers to a polypeptide that does not include a functional PI domain, e.g., a polypeptide not having an endogenous PI domain, e.g., wherein the endogenous PI domain is deleted (deleted, as used in this context, refers merely to a sequence difference or the absence of amino acid residues and implies no process or origin limitation), or generally, a Cas9 molecule lacking a PI domain. In an embodiment, a Cas9 core domain comprises a REC1 domain, a REC2 domain, a BH domain, a RuvC domain, and an HNH domain. A Cas9 core domain, together with an altered PI domain, comprises a functional Cas9 molecule.

[0279] In an embodiment, a species X Cas9 core domain has at least 20, 30, 40, 50, 60, 70, 80, 81, 82, 83, 84, 85, 86, 87, 88, 89, 90, 91, 92, 93, 94, 95, 96, 97, 98, 99, or 100% homology with the corresponding sequence of a reference sequence, e.g., a naturally occurring species X Cas9 core domain, e.g., from a Cas9 core domain from Table 111.1. In an embodiment, each of a REC1 domain, a REC2 domain, a BH domain, a RuvC domain, and/or an HNH domain of a species X Cas9 core domain has, independently, at least 20, 30, 40, 50, 60, 70, 80, 81, 82, 83, 84, 85, 86, 87, 88, 89, 90, 91, 92, 93, 94, 95, 96, 97, 98, 99, or 100% homology with the corresponding sequence of a reference sequence, e.g., a naturally occurring species X Cas9 core domain, e.g., from a Cas9 core domain from Table III.1.

[0280] As used herein, the term “Cas9 system” refers to a system capable of altering a target nucleic acid by one of many DNA repair pathways. In one embodiment, the Cas9 system described herein promotes repair of the target nucleic acid via an HDR pathway. In one embodiment, a Cas9 system comprises a gRNA molecule and a Cas9 molecule. In another embodiment, a Cas9 system comprises a gRNA molecule, a Cas9 molecule, and an HDR-enhancer molecule. In one embodiment, a Cas9 system further comprises a second gRNA molecule. In one embodiment, the Cas9 molecule is fused to a transcription activator. In another embodiment, the Cas9 molecule is fused to a transcription repressor. In yet another embodiment, a Cas9 system comprises a gRNA molecule, a Cas9 nickase molecule, and a second gRNA molecule. In one embodiment, a Cas9 system further comprises a template nucleic acid.

[0281] “Derived from”, as used herein, refers to the source or origin of a molecular entity, e.g., a nucleic acid or protein. The source of a molecular entity may be naturally-occurring, recombinant, unpurified, or a purified molecular entity. For example, a polypeptide that is derived from a second polypeptide comprises an amino acid sequence that is identical or substantially similar, e.g., is more than 50% homologous to, the amino acid sequence of the second protein. The derived molecular entity, e.g., a nucleic acid or protein, can comprise one or more modifications, e.g., one or more amino acid or nucleotide changes.

[0282] A disorder “caused by” a mutation, as used herein, refers to a disorder that is made more likely or severe by the presence of the mutation, compared to a subject that does not have the mutation. The mutation need not be the only cause of a disorder, i.e., the disorder can still be caused by the mutation even if other causes, such as environmental factors or lifestyle factors, contribute causally to the disorder. In embodiments, the disorder is caused by the mutation if the mutation is a medically recognized risk factor for developing the disorder, and/or if a study has found that the mutation contributes causally to development of the disorder.

[0283] “Domain”, as used herein, is used to describe segments of a protein or nucleic acid. Unless otherwise indicated, a domain is not required to have any specific functional property.

[0284] A “down-regulator”, as used herein, refers to an agent that directly decreases the activity of a specified biological pathway. Directly decreasing the activity of the pathway refers to the down-regulator binding to a component of that pathway (e.g., a protein that acts in the pathway or an mRNA encoding that protein) and decreasing the level or activity of that component, e.g., by decreasing the concentration or specific activity of that component. For example, a down-regulator may slow one of the steps of that pathway or decrease the level or activity of a component in that pathway. A down-regulator may be, e.g., an inhibitor of a protein in the pathway, or an siRNA or a gRNA that induces a reduction in the expression of a protein in the pathway. The pathway may be, e.g., a DNA damage repair pathway, for example, HDR. In an embodiment, the decreased level or activity is compared to what would be seen in the absence of the down-regulator.

[0285] As used herein, “error-prone” repair refers to a DNA repair process that has a higher tendency to introduce mutations into the site being repaired. For instance, alt-NHEJ and SSA are error-prone pathways; C-NHEJ is also error prone because it sometimes leads to the creation of a small degree of alteration of the site (even though in some instances C-NHEJ results in error-free repair); and HR, alt-HR, and SSA in the case of a single strand oligo donor are not error-prone.

[0286] As used herein, an “EPR enhancer” refers to an agent that enhances (e.g., increases the frequency or efficiency of) error-prone repair (EPR). In some embodiments, the EPR-enhancer acts on a target in a DNA damage repair pathway, e.g., alt-NHEJ or SSA. The EPR-enhancer may act on, e.g., inhibit, a protein or nucleic acid (e.g., a miRNA) that stimulates a non-error-prone form of DNA repair. The EPR-enhancer may be, e.g., a small molecule, a macromolecule, a protein, an antibody, a peptide, a nucleic acid, a siRNA, an EPR-enhancing gRNA, a miRNA, or an antiMiR.

[0287] As used herein, the term “EPR-enhancing gRNA” refers to a gRNA, which, in combination with a Cas9 molecule (e.g., an eiCas9 molecule), enhances (e.g., increases the frequency or efficiency of) error-prone repair (e.g., alt-NJEH and SSA). In some embodiments, the EPR-enhancing gRNA guides a Cas9-mediated reduction in the transcription of a gene encoding a non-error-prone DNA damage repair pathway protein. In some embodiments, the EPR-enhancing gRNA guides a Cas9-mediated cleavage event in a gene encoding a non-error-prone DNA damage repair pathway protein (e.g., a protein involved in HDR, such as HR, alt-HR, and/or SSA).

[0288] As used herein, the term “gRNA molecule” or “gRNA” refers to a guide RNA which is capable of targeting a Cas9 molecule to a target nucleic acid. In one embodiment, the term “gRNA molecule” refers to a gRNA. In another embodiment, the term “gRNA molecule” refers to a nucleic acid encoding a gRNA.

[0289] “HDR”, or homology-directed repair, as used herein, refers to the process of repairing DNA damage using a homologous nucleic acid (e.g., a sister chromatid or an exogenous nucleic acid, e.g., a template nucleic acid). HDR typically occurs when there has been significant resection at a double strand break, forming at least one single stranded portion of DNA. HDR is a category that includes, for example, single-strand annealing (SSA), homologous recombination (HR), and a third, not yet fully characterized alternative homologous recombination (alt-HR) DNA repair pathway (see FIG. 1). In some embodiments, the term HDR does not encompass canonical NHEJ (C-NHEJ). In some embodiments, the term HDR does not encompass alternative non-homologous end joining (Alt-NHEJ) (e.g., blunt end-joining (blunt EJ), (micro homology mediated end joining (MMEJ), and synthesis dependent microhomology-mediated end joining (SD-MMEJ)).

[0290] As used herein, the term “HDR-enhancer molecule” or “HDR enhancer” refers to an agent that enhances (e.g., increases the frequency or efficiency of) HDR (e.g., SSA, HR, or alt-HR). In some embodiments, and HDR-enhancer may act on one HDR pathway component to enhance (e.g., increase the frequency or efficiency of) the other HDR pathways. For example, an HDR-enhancer may down-regulate HR in order to enhance SSA and/or alt-HR. In another embodiment, an HDR-enhancer may down-regulate SSA to enhance HR and/or alt-HR. In yet another embodiment, an HDR-enhancer may downregulate alt-HR to enhance HR and/or SSA. In some embodiments, the HDR-enhancer acts to down-regulate a target in a DNA damage repair pathway, e.g., anti-HR, SSA, SSBR, alt-NHEJ, canonical NHEJ, or SDMMEJ. The HDR-enhancer may act on, e.g., inhibit, a protein or nucleic acid (e.g., a miRNA) that stimulates a non-HDR form of DNA repair. The HDR-enhancer molecule may be, e.g., a small molecule, a macromolecule, a protein, an antibody, e.g., an intrabody, a peptide, a nucleic acid, a siRNA, a HDR-enhancing gRNA, a miRNA, or an antiMiR. Alternatively, an HDR-enhancer molecule may be a nucleic acid encoding a protein, a protein, e.g., a dominant negative protein, an antibody, an HDR-enhancing gRNA, a miRNA, or an antiMiR.

[0291] As used herein, the term “HDR-enhancing gRNA molecule” or “HDR-enhancing gRNA” refers to a gRNA, which, in combination with a Cas9 molecule (e.g., an eiCas9 molecule or an eaCas9 molecule), enhances (e.g., increases the frequency or efficiency of) HDR (e.g., SSA, HR, or alt-HR) as compared to what would occur in the absence of the HDR-enhancing gRNA molecule. In some embodiments, the HDR-enhancing gRNA molecule guides a Cas9-mediated reduction in the transcription of a gene encoding a DNA damage repair pathway protein. In some embodiments, the HDR-enhancing gRNA molecule guides a Cas9-mediated cleavage event in a gene encoding a DNA damage repair pathway protein. In some embodiments, the DNA damage repair pathway protein is a protein involved in a non-HDR form of DNA repair. In one embodiment, the HDR-enhancing gRNA molecule is a gRNA. In another embodiment, the HDR-enhancing gRNA molecule is a nucleic acid encoding a gRNA.

[0292] The terms “homology” or “identity,” as used interchangeably herein, refer to sequence identity between two amino acid sequences or two nucleic acid sequences, with identity being a more strict comparison. The phrases “percent identity or homology” and “% identity or homology” refer to the percentage of sequence identity found in a comparison of two or more amino acid sequences or nucleic acid sequences. Two or more sequences can be anywhere from 0-100% identical, or any value there between. Identity can be determined by comparing a position in each sequence that can be aligned for purposes of comparison to a reference sequence. When a position in the compared sequence is occupied by the same nucleotide base or amino acid, then the molecules are identical at that position. A degree of identity of amino acid sequences is a function of the number of identical amino acids at positions shared by the amino acid sequences. A degree of identity between nucleic acid sequences is a function of the number of identical or matching nucleotides at positions shared by the nucleic acid sequences. A degree of homology of amino acid sequences is a function of the number of amino acids at positions shared by the polypeptide sequences.

[0293] Calculations of homology or sequence identity between two sequences (the terms are used interchangeably herein) are performed as follows. The sequences are aligned for optimal comparison purposes (e.g., gaps can be introduced in one or both of a first and a second amino acid or nucleic acid sequence for optimal alignment and non-homologous sequences can be disregarded for comparison purposes). The optimal alignment is determined as the best score using the GAP program in the GCG software package with a Blossum 62 scoring matrix with a gap penalty of 12, a gap extend penalty of 4, and a frame shift gap penalty of 5. The amino acid residues or nucleotides at corresponding amino acid positions or nucleotide positions are then compared. When a position in the first sequence is occupied by the same amino acid residue or nucleotide as the corresponding position in the second sequence, then the molecules are identical at that position. The percent identity between the two sequences is a function of the number of identical positions shared by the sequences.

[0294] The term, “HR” refers to a type of HDR DNA-repair which typically acts occurs when there has been significant resection at the double strand break, forming at least one single stranded portion of DNA. In a normal cell, HR” or “Homologous recombination” typically involves a series of steps such as recognition of the break, stabilization of the break, resection, stabilization of single stranded DNA, formation of a DNA crossover intermediate, resolution of the crossover intermediate, and ligation. The process requires RAD51 and BRCA2, and the homologous nucleic acid is typically double-stranded.

[0295] The term “inhibitor” as used herein refers to a molecule that binds a specified biological target, thereby inhibiting the function of that biological target. An inhibitor may be, e.g., a small molecule or a siRNA. The biological target may be, e.g., a protein or an RNA (such as an mRNA or a miRNA). In embodiments, the inhibitor is specific for the biological target, e.g., lacks substantial activity against one or more control biological targets. In embodiments, the inhibitor has substantial activity towards only one biological target, or less than 3 biological targets, or less than 5 biological targets. In embodiments, the inhibitor promotes degradation of the biological target.

[0296] “Landmark” or “landmark position”, as used herein, refers to a nucleotide in a target nucleic acid.

[0297] “Large molecule”, as used herein, refers to a molecule having a molecular weight of at least 2, 3, 5, 10, 20, 30, 40, 50, 60, 70, 80, 90, or 100 kDa. Large molecules include proteins, polypeptides, nucleic acids, biologics, and carbohydrates.

[0298] “Linker”, as that term is used herein, refers to a sequence comprising at least one amino acid. Typically it is disposed between sequences or domains of a Cas9. In an embodiment, the linker is disposed between the amino acid residues that flank a deletion. In an embodiment, the linker is disposed between the amino acid residues of a Cas9 core domain and an altered PI domain. By way of example, in a sequence _{CT}1-_{CT}2-_{CT}3-_{CT}7-_{CT}8-_{CT}9, wherein _{CT}4-_{CT}5-_{CT}6 is deleted, the linker is located immediately C-terminal to the amino acid residue _{CT}3 and immediately N-terminal to the amino acid residue _{CT}7. Preferably, the linker is selected such that the Cas9 molecule exhibits a tertiary structure or folded conformation similar to that of the corresponding naturally occurring Cas9 molecule, such that some Cas9 activity is retained. Suitable linkers are described herein. In an embodiment, the linker comprises a combination of Gly and Ser residues, e.g., (GS)ₓ (SEQ ID NO: 341) or (GGS)ₓ(SEQ ID NO: 339), where x is 1, 2, 3, 4, 5, 6, 7, 8, 9 or 10. In an embodiment, the linker comprises a linker comprising the amino acid sequence (SGSETPGTSESATPES)x, where x is 1, 2, 3, or 4 (SEQ ID NO: 344), referred to herein as XTEN linker or XTEN. Alternative linkers include (GSAGSAAGSGEF)ₓ, wherein x is 1, 2, 3 or 4 (SEQ ID NO: 201) and (SIVAQLSRPDPA)ₓ, wherein x is 1, 2, 3 or 4 (SEQ ID NO: 202). Linkers also include a combination of linkers described herein or known in the art.

[0299] “Modulator”, as used herein, refers to an entity, e.g., a compound, that can alter the activity (e.g., enzymatic activity, transcriptional activity, or translational activity), amount, distribution, or structure of a subject molecule or genetic sequence. In an embodiment, modulation comprises cleavage, e.g., breaking of a covalent or non-covalent bond, or the forming of a covalent or non-covalent bond, e.g., the attachment of a moiety, to the subject molecule. In an embodiment, a modulator alters the three dimensional, secondary, tertiary, or quaternary structure, of a subject molecule. A modulator can increase, decrease, initiate, or eliminate a subject activity.

[0300] “PI domain”, as that term is used herein, refers to the region of a Cas9 molecule that interacts with the PAM sequence of a target nucleic acid.

[0301] “Prevent,” “preventing” and “prevention,” as used herein, means the prevention of a disease in a subject, e.g., a mammal, e.g., in a human, including (a) avoiding or precluding the disease; (2) affecting the predisposition toward the disease, e.g., preventing at least one symptom of the disease or to delay onset of at least one symptom of the disease.

[0302] “REC deletion”, as that term is used herein, refers to a REC2 deletion, a REC1_{CT} deletion, or a REC1_{SUB} deletion.

[0303] “n” as used herein in the context of proteins or Cas9 molecules described herein, refers to the number of amino acid residues that are deleted in a REC2, REC1_{CT}, or REC1_{SUB} deletion, unless otherwise specified.

[0304] Unless indicate otherwise, “NHEJ” as used herein encompasses canonical NHEJ and alt-NHEJ.

[0305] “Polypeptide”, as used herein, refers to a polymer of amino acids.

[0306] “REC2 deletion”, as that term is used herein, refers to a deletion of at least 10% of the amino acid residues of the REC2 domain.

[0307] “REC2 domain”, as that term is used herein, refers to a region, in the N terminal half of a naturally occurring Cas9 molecule that is not needed for cleavage or gRNA-mediated targeting. Its length and boundaries differ between Cas9 molecules from various species. In the case of S. aureus, the REC2 domain is about 41 amino acid residues in length and corresponds, approximately, to residues 126 to 166, of S. aureus Cas9. In the case of S. pyogenes, the REC2 domain is about 139 amino acid residues in length and corresponds, approximately, to residues 176 to 314 of S. pyogenes Cas9. In the case of C. jejuni, the REC2 domain is about 45 amino acid residues in length and corresponds, approximately, to residues 137 to 181 of C. jejuni Cas9. These, and the approximate sizes and boundaries of REC2 domains from other species are provided in Table 111.1.

[0308] “REC1_{CT} deletion”, as that term is used herein, refers to a deletion of at least 10% of the amino acid residues of the REC1_{CT} domain.

[0309] “REC1_{CT} domain”, as that term is used herein, refers to a region, C terminal of the REC1 domain, of a naturally occurring Cas9 polypeptide that is not needed for cleavage or gRNA-mediated targeting. Its length and boundaries differ between Cas9 proteins from various species. In the case of S. aureus, the REC1_{CT} domain is about 146 amino acid residues in length and corresponds, approximately, to residues 288 to 166, of S. aureus Cas9. In the case of S. pyogenes, the REC1_{CT} domain is about 219 amino acid residues in length and corresponds, approximately, to residues 500 to 718 of S. pyogenes Cas9. In the case of C. jejuni, the REC1_{CT} domain is about 134 amino acid residues in length and corresponds, approximately, to residues 305 to 438 of C. jejuni Cas9. These, and the approximate sizes and boundaries of REC1_{CT} domains from other species are provided in Table 111.1.

[0310] “REC1_{SUB} deletion”, as that term is used herein, refers to a deletion of at least 10% of the amino acid residues of the REC1_{SUB} domain.

[0311] “REC1_{SUB} domain”, as that term is used herein, refers to a region, located within the REC1_{CT} domain, of a naturally occurring Cas9 polypeptide that is not needed for cleavage or gRNA-mediated targeting. Its length and boundaries differ between Cas9 proteins from various species. In the case of S. aureus, the REC1_{Sub} domain is about 57 amino acid residues in length and corresponds, approximately, to residues 296 to 352, of S. aureus Cas9. In the case of S. pyogenes, the REC1_{Sub} domain is about 82 amino acid residues in length and corresponds, approximately, to residues 511 to 592 of S. pyogenes Cas9. In the case of C. jejuni, the REC1_{Sub} domain is about 45 amino acid residues in length and corresponds, approximately, to residues 316 to 360 of C. jejuni Cas9. These, and the approximate sizes and boundaries of REC1_{Sub} domains from other species are provided in Table 111.1.

[0312] “Reference molecule”, e.g., a reference Cas9 molecule or reference gRNA, as used herein, refers to a molecule to which a subject molecule, e.g., a subject Cas9 molecule of subject gRNA molecule, e.g., a modified or candidate Cas9 molecule is compared. For example, a Cas9 molecule can be characterized as having no more than 10% of the nuclease activity of a reference Cas9 molecule. Examples of reference Cas9 molecules include naturally occurring unmodified Cas9 molecules, e.g., a naturally occurring Cas9 molecule such as a Cas9 molecule of S. pyogenes, or S. thermophilus. In an embodiment, the reference Cas9 molecule is the naturally occurring Cas9 molecule having the closest sequence identity or homology with the Cas9 molecule to which it is being compared. In an embodiment, the reference Cas9 molecule is a sequence, e.g., a naturally occurring or known sequence, which is the parental form on which a change, e.g., a mutation has been made.

[0313] “Replacement”, or “replaced”, as used herein with reference to a modification of a molecule does not require a process limitation but merely indicates that the replacement entity is present.

[0314] “Resection”, as used herein, refers to exonuclease-mediated digestion of one strand of a double-stranded DNA molecule, which results in a single-stranded overhang. Resection may occur, e.g., on one or both sides of a double-stranded break. Resection can be measured by, for instance, extracting genomic DNA, digesting it with an enzyme that selectively degrades dsDNA, and performing quantitative PCR using primers spanning the DSB site, e.g., as described in Section IV.

[0315] “Small molecule”, as used herein, refers to a compound having a molecular weight less than about 2 kDa, e.g., less than about 2 kDa, less than about 1.5 kDa, less than about 1 kDa, or less than about 0.75 kDa.

[0316] “Subject”, as used herein, may mean either a human or non-human animal. The term includes, but is not limited to, mammals (e.g., humans, other primates, pigs, rodents (e.g., mice and rats or hamsters), rabbits, guinea pigs, cows, horses, cats, dogs, sheep, and goats). In an embodiment, the subject is a human. In other embodiments, the subject is poultry. In another embodiment, the subject is a fish.

[0317] “SSA” or “Single Strand Anealing”, as used herein, refers to the process where RAD52 as opposed to RAD51 in the HR pathways, binds to the single stranded portion of DNA and promotes annealing of the two single stranded DNA segments at repetitive regions. Once RAD52 binds XFP/ERCC1 removes DNA flaps to make the DNA more suitable for ligation.

[0318] A “synthetic Cas9 molecule”, or “Syn-Cas9 molecule”, as that term is used herein, refers to a Cas9 molecule that comprises a Cas9 core domain from one bacterial species and a functional altered PI domain, i.e., a PI domain other than that naturally associated with the Cas9 core domain, e.g., from a different bacterial species. Syn-Cas9 polypeptides are also provided.

[0319] As used herein, the term “target nucleic acid” refers to a nucleic acid which is being targeted for alteration by a Cas9 system described herein. In one embodiment, a target nucleic acid comprise one gene. In another embodiment, a target nucleic acid may comprise one or more genes, e.g., two genes, three genes, four genes, or five genes.

[0320] “Target position” as used herein, refers to a site on a target nucleic acid (e.g., the chromosome) that is modified by a Cas9 molecule-dependent process. For example, the target position can be modified by a Cas9 molecule-mediated cleavage of the target nucleic acid and template nucleic acid directed modification, e.g., correction, of the target position. In an embodiment, a target position can be a site between two nucleotides, e.g., adjacent nucleotides, on the target nucleic acid into which one or more nucleotides is added. The target position may comprise one or more nucleotides that are altered, e.g., corrected, by a template nucleic acid. In an embodiment, the target position is within a “target sequence” (e.g., the sequence to which the gRNA binds). In an embodiment, a target position is upstream or downstream of a target sequence (e.g., the sequence to which the gRNA binds).

[0321] The “targeting domain” of the gRNA is complementary to the “target domain” on the target nucleic acid.

[0322] A “target sequence” is the sequence of a target domain.

[0323] A “template nucleic acid” as that term is used herein, refers to a nucleic acid sequence which can be used in conjunction with a Cas9 molecule and a gRNA molecule to alter the structure of a target position. In an embodiment, the target nucleic acid is modified to have the some or all of the sequence of the template nucleic acid, typically at or near cleavage site(s). In an embodiment, the template nucleic acid is single stranded. In an alternate embodiment, the template nucleic acid is double stranded. In an embodiment, the template nucleic acid is DNA, e.g., double stranded DNA. In an alternate embodiment, the template nucleic acid is single stranded DNA. In an embodiment, the template nucleic acid is RNA, e.g., double stranded RNA or single stranded RNA. In an embodiment, the template nucleic acid is encoded on the same vector backbone, e.g., AAV genome, plasmid DNA, as the Cas9 and gRNA. In an embodiment, the template nucleic acid is excised from a vector backbone in vivo, e.g., it is flanked by gRNA recognition sequences. In one embodiment, the template DNA is in an ILDV. In another embodiment, the template DNA is an endogenous nucleic acid sequence. In one embodiment, the template nucleic acid is a single stranded oligonucleotide corresponding to a plus strand of a nucleic acid sequence. In another embodiment, the template nucleic acid is a single stranded oligonucleotide corresponding to a minus strand of a nucleic acid sequence.

[0324] As used herein, the term “transcription activator” refers to a polypeptide or a nucleic acid encoding a polypeptide that increases the transcription of a gene or a set of genes. A transcription activator may be a DNA-binding protein that binds to an enhancer or a promoter-proximal element. In one embodiment, a transcription activator is fused to, or linked to, a Cas9 molecule of the invention in order to temporarily increase transcription of a gene or genes. In one embodiment, the Cas9 molecule is an eaCas9 molecule.

[0325] As used herein, the term “transcription repressor” refers to a polypeptide or a nucleic acid encoding a polypeptide that decreases or inhibits the transcription of a gene or a set of genes. A transcription repressor may be a DNA-binding protein that binds to an enhancer or a promoter-proximal element. In one embodiment, a transcription repressor is fused to, or linked to, a Cas9 molecule of the invention in order to temporarily decrease, or temporarily inhibit transcription of a gene or genes. In one embodiment, the Cas9 molecule is an eaCas9 molecule.

[0326] “Treat”, “treating” and “treatment”, as used herein, mean the treatment of a disease in a mammal, e.g., in a human, including (a) inhibiting the disease, i.e., arresting or preventing its development; (b) relieving the disease, i.e., causing regression of the disease state; and (c) curing the disease.

[0327] An “up-regulator”, as used herein, refers to an agent that directly increases the activity of a specified biological pathway. Directly increasing the activity of the pathway refers to (i) the up-regulator binding to a component of that pathway (e.g., a protein that acts in the pathway or an mRNA encoding that protein) and increasing the level or activity of that component, e.g., by increasing the concentration or specific activity of that component, or (ii) the up-regulator is an added amount of a component that is ordinarily present in the pathway at a given level, e.g., an overexpressed protein. An up-regulator may, e.g., speed up one of the steps of that pathway or increase the level or activity of a component in that pathway. An up-regulator may be, e.g., a protein in the pathway, e.g., one may overexpress a protein that is ordinarily in the pathway to increase the overall activity of the pathway. The pathway may be, e.g., a DNA damage repair pathway, for example, HDR. In an embodiment, the increased level or activity is compared to what would be seen in the absence of the up-regulator.

[0328] “Wild type”, as used herein, refers to a gene or polypeptide which has the characteristics, e.g., the nucleotide or amino acid sequence, of a gene or polypeptide from a naturally-occurring source. The term “wild type” typically includes the most frequent observation of a particular gene or polypeptide in a population of organisms found in nature.

[0329] “X” as used herein in the context of an amino acid sequence of a linker sequence, refers to any number of repeating units unless otherwise specified.

[0330] “X” as used herein in the context of a Cas9 molecule or core domain, e.g., “species X Cas9” designates the species from which the Cas9 molecule or core domain is derived from.

I. gRNA Molecules

[0331] A gRNA molecule, as that term is used herein, refers to a nucleic acid that promotes the specific targeting or homing of a gRNA molecule/Cas9 molecule complex to a target nucleic acid. Typically, the nucleic acid will incorporate the functions or structure of both crRNA and tracrRNA, e.g., the functions of processed or mature crRNA and of processed or mature tracrRNA. gRNA molecules can be unimolecular (having a single nucleic acid molecule, e.g., which incorporates both crRNA function or structure and the tracrRNA function or structure), sometimes referred to herein as “chimeric” gRNAs, or modular (comprising more than one, and typically two, separate nucleic acid molecules, e.g., where one incorporates the crRNA function or structure and the other incorporates the tracrRNA function or structure). A gRNA molecule comprises a number of domains. The gRNA molecule domains are described in more detail below. Additional details on gRNAs are provided in Section I entitled “gRNA molecules” of PCT Application WO 2015/048577, the entire contents of which are expressly incorporated herein by reference.

[0332] In an embodiment, a unimolecular, or chimeric, gRNA comprises, preferably from 5′ to 3′: a targeting domain (which is complementary to a target nucleic acid, and which is sometimes referred to as a spacer); a first complementarity domain; a linking domain; a second complementarity domain (which is complementary to the first complementarity domain); a proximal domain; and optionally, a tail domain. In an embodiment, the targeting domain, and first complementarity domain correspond functionally or structurally to elements of a crRNA, e.g., a mature or processed crRNA. In an embodiment, the second complementarity domain, proximal domain, and tail domain correspond functionally or structurally to elements of a tracrRNA, e.g., a processed or mature tracrRNA.

[0333] In an embodiment, a modular gRNA comprises: a first strand (which corresponds to a crRNA) comprising, preferably from 5′ to 3′; a targeting domain (which is complementary to a target nucleic acid); and a first complementarity domain; and a second strand (which corresponds to a tracrRNA), comprising, preferably from 5′ to 3′: optionally, a 5′ extension domain; a second complementarity domain; a proximal domain; and optionally, a tail domain.

[0334] The domains are discussed briefly below.

[0335] Targeting Domain

[0336] The targeting domain (which can also be referred to as a “spacer”) comprises a nucleotide sequence that is complementary, e.g., at least 80, 81, 82, 83, 84, 85, 86, 87, 88, 89, 90, 91, 92, 93, 94, 95, 96, 97, 98, or 99% complementary, e.g., fully complementary, to the target sequence on the target nucleic acid. The targeting domain is part of an RNA molecule and will therefore comprise the base uracil (U), while any DNA encoding the gRNA molecule will comprise the base thymine (T). While not wishing to be bound by theory, in an embodiment, it is believed that the complementarity of the targeting domain with the target sequence contributes to specificity of the interaction of the gRNA molecule/Cas9 molecule complex with a target nucleic acid. It is understood that in a targeting domain and target sequence pair, the uracil bases in the targeting domain will pair with the adenine bases in the target sequence. In an embodiment, the targeting domain itself comprises in the 5′ to 3′ direction, an optional secondary domain, and a core domain. In an embodiment, the core domain is fully complementary with the target sequence. In an embodiment, the targeting domain is 5 to 50 nucleotides in length, e.g., 10 to 30, e.g., 16, 17, 18, 19, 20, 21, 22, 23, 24, or 26, nucleotides in length. The strand of the target nucleic acid with which the targeting domain is complementary is referred to herein as the complementary strand. Some or all of the nucleotides of the targeting domain can have a modification, e.g., a modification found in Section X herein.

[0337] In an embodiment, the targeting domain is 16 nucleotides in length. In an embodiment, the targeting domain is 17 nucleotides in length. In an embodiment, the targeting domain is 18 nucleotides in length. In an embodiment, the targeting domain is 19 nucleotides in length. In an embodiment, the targeting domain is 20 nucleotides in length. In an embodiment, the targeting domain is 21 nucleotides in length. In an embodiment, the targeting domain is 22 nucleotides in length. In an embodiment, the targeting domain is 23 nucleotides in length. In an embodiment, the targeting domain is 24 nucleotides in length. In an embodiment, the targeting domain is 25 nucleotides in length. In an embodiment, the targeting domain is 26 nucleotides in length. In an embodiment, the targeting domain comprises 16 nucleotides. In an embodiment, the targeting domain comprises 17 nucleotides. In an embodiment, the targeting domain comprises 18 nucleotides. In an embodiment, the targeting domain comprises 19 nucleotides. In an embodiment, the targeting domain comprises 20 nucleotides. In an embodiment, the targeting domain comprises 21 nucleotides. In an embodiment, the targeting domain comprises 22 nucleotides. In an embodiment, the targeting domain comprises 23 nucleotides. In an embodiment, the targeting domain comprises 24 nucleotides. In an embodiment, the targeting domain comprises 25 nucleotides. In an embodiment, the targeting domain comprises 26 nucleotides.

[0338] Targeting domains are discussed in more detail below.

[0339] First Complementarity Domain

[0340] The first complementarity domain is complementary with the second complementarity domain, and in an embodiment, has sufficient complementarity to the second complementarity domain to form a duplexed region under at least some physiological conditions. In an embodiment, the first complementarity domain is 5 to 30 nucleotides in length. In an embodiment, the first complementarity domain is 5 to 25 nucleotides in length. In an embodiment, the first complementary domain is 7 to 25 nucleotides in length. In an embodiment, the first complementary domain is 7 to 22 nucleotides in length. In an embodiment, the first complementary domain is 7 to 18 nucleotides in length. In an embodiment, the first complementary domain is 7 to 15 nucleotides in length. In an embodiment, the first complementary domain is 5, 6, 7, 8, 9, 10, 11, 12, 13, 14, 15, 16, 17, 18, 19, 20, 21, 22, 23, 24, or 25 nucleotides in length.

[0341] In an embodiment, the first complementarity domain comprises 3 subdomains, which, in the 5′ to 3′ direction are: a 5′ subdomain, a central subdomain, and a 3′ subdomain. In an embodiment, the 5′ subdomain is 4 to 9, e.g., 4, 5, 6, 7, 8 or 9 nucleotides in length. In an embodiment, the central subdomain is 1, 2, or 3, e.g., 1, nucleotide in length. In an embodiment, the 3′ subdomain is 3 to 25, e.g., 4 to 22, 4 to 18, or 4 to 10, or 3, 4, 5, 6, 7, 8, 9, 10, 11, 12, 13, 14, 15, 16, 17, 18, 19, 20, 21, 22, 23, 24, or 25 nucleotides in length.

[0342] The first complementarity domain can share homology with, or be derived from, a naturally occurring first complementarity domain. In an embodiment, it has at least 50% homology with a first complementarity domain disclosed herein, e.g., an S. pyogenes, S. aureus or S. thermophilus, first complementarity domain.

[0343] Some or all of the nucleotides of the domain can have a modification, e.g., a modification found in Section X herein.

[0344] First complementarity domains are discussed in more detail below.

[0345] Linking Domain

[0346] A linking domain serves to link the first complementarity domain with the second complementarity domain of a unimolecular gRNA. The linking domain can link the first and second complementarity domains covalently or non-covalently. In an embodiment, the linkage is covalent. In an embodiment, the linking domain covalently couples the first and second complementarity domains. In an embodiment, the linking domain is, or comprises, a covalent bond interposed between the first complementarity domain and the second complementarity domain. Typically the linking domain comprises one or more, e.g., 2, 3, 4, 5, 6, 7, 8, 9, or 10 nucleotides.

[0347] In modular gRNA molecules the two molecules are associated by virtue of the hybridization of the complementarity domains.

[0348] A wide variety of linking domains are suitable for use in unimolecular gRNA molecules. Linking domains can consist of a covalent bond, or be as short as one or a few nucleotides, e.g., 1, 2, 3, 4, or 5 nucleotides in length. In an embodiment, a linking domain is 2, 3, 4, 5, 6, 7, 8, 9, 10, 15, 20, or 25 or more nucleotides in length. In an embodiment, a linking domain is 2 to 50, 2 to 40, 2 to 30, 2 to 20, 2 to 10, or 2 to 5 nucleotides in length. In an embodiment, a linking domain shares homology with, or is derived from, a naturally occurring sequence, e.g., the sequence of a tracrRNA that is 5′ to the second complementarity domain. In an embodiment, the linking domain has at least 50% homology with a linking domain disclosed herein.

[0349] Some or all of the nucleotides of the domain can have a modification, e.g., a modification found in Section X herein.

[0350] Linking domains are discussed in more detail below.

[0351] 5′ Extension Domain

[0352] In an embodiment, a modular gRNA can comprise additional sequence, 5′ to the second complementarity domain, referred to herein as the 5′ extension domain. In an embodiment, the 5′ extension domain is, 2 to 10, 2 to 9, 2 to 8, 2 to 7, 2 to 6, 2 to 5, or 2 to 4, nucleotides in length. In an embodiment, the 5′ extension domain is 2, 3, 4, 5, 6, 7, 8, 9, or 10 or more nucleotides in length.

[0353] Second Complementarity Domain

[0354] The second complementarity domain is complementary with the first complementarity domain, and in an embodiment, has sufficient complementarity to the second complementarity domain to form a duplexed region under at least some physiological conditions. In an embodiment, the second complementarity domain can include sequence that lacks complementarity with the first complementarity domain, e.g., sequence that loops out from the duplexed region.

[0355] In an embodiment, the second complementarity domain is 5 to 27 nucleotides in length. In an embodiment, it is longer than the first complementarity region. In an embodiment the second complementary domain is 7 to 27 nucleotides in length. In an embodiment, the second complementary domain is 7 to 25 nucleotides in length. In an embodiment, the second complementary domain is 7 to 20 nucleotides in length. In an embodiment, the second complementary domain is 7 to 17 nucleotides in length. In an embodiment, the complementary domain is 5, 6, 7, 8, 9, 10, 11, 12, 13, 14, 15, 16, 17, 18, 19, 20, 21, 22, 23, 24, 25 or 26 nucleotides in length.

[0356] In an embodiment, the second complementarity domain comprises 3 subdomains, which, in the 5′ to 3′ direction are: a 5′ subdomain, a central subdomain, and a 3′ subdomain. In an embodiment, the 5′ subdomain is 3 to 25, e.g., 4 to 22, 4 to 18, or 4 to 10, or 3, 4, 5, 6, 7, 8, 9, 10, 11, 12, 13, 14, 15, 16, 17, 18, 19, 20, 21, 22, 23, 24, or 25 nucleotides in length. In an embodiment, the central subdomain is 1, 2, 3, 4 or 5, e.g., 3, nucleotides in length. In an embodiment, the 3′ subdomain is 4 to 9, e.g., 4, 5, 6, 7, 8 or 9 nucleotides in length.

[0357] In an embodiment, the 5′ subdomain and the 3′ subdomain of the first complementarity domain, are respectively, complementary, e.g., fully complementary, with the 3′ subdomain and the 5′ subdomain of the second complementarity domain.

[0358] The second complementarity domain can share homology with or be derived from a naturally occurring second complementarity domain. In an embodiment, it has at least 50% homology with a second complementarity domain disclosed herein, e.g., an S. pyogenes, S. aureus or S. thermophilus, first complementarity domain.

[0359] Some or all of the nucleotides of the domain can have a modification, e.g., a modification found in Section X herein.

[0360] Proximal Domain

[0361] In an embodiment, the proximal domain is 5 to 20 nucleotides in length. In an embodiment, the proximal domain can share homology with or be derived from a naturally occurring proximal domain. In an embodiment, it has at least 50% homology with a proximal domain disclosed herein, e.g., an S. pyogenes, S. aureus or S. thermophilus, proximal domain.

[0362] Some or all of the nucleotides of the domain can have a modification, e.g., a modification found in Section X herein.

[0363] Tail Domain

[0364] A broad spectrum of tail domains are suitable for use in gRNA molecules. In an embodiment, the tail domain is 0 (absent), 1, 2, 3, 4, 5, 6, 7, 8, 9, or 10 nucleotides in length. In embodiment, the tail domain nucleotides are from or share homology with sequence from the 5′ end of a naturally occurring tail domain. In an embodiment, the tail domain includes sequences that are complementary to each other and which, under at least some physiological conditions, form a duplexed region.

[0365] In an embodiment, the tail domain is absent or is 1 to 50 nucleotides in length. In an embodiment, the tail domain can share homology with or be derived from a naturally occurring proximal tail domain. In an embodiment, it has at least 50% homology with a tail domain disclosed herein, e.g., an S. pyogenes, S. aureus or S. thermophilus, tail domain.

[0366] In an embodiment, the tail domain includes nucleotides at the 3′ end that are related to the method of in vitro or in vivo transcription. When a T7 promoter is used for in vitro transcription of the gRNA, these nucleotides may be any nucleotides present before the 3′ end of the DNA template. When a U6 promoter is used for in vivo transcription, these nucleotides may be the sequence UUUUUU. When alternate pol-III promoters are used, these nucleotides may be various numbers or uracil bases or may include alternate bases.

[0367] In an embodiment the 3′ end of the tail domain is modified to render the gRNA non-toxic to cells or whole organisms e.g., humans.

[0368] The domains of gRNA molecules are described in more detail below.

[0369] Targeting Domain

[0370] The “targeting domain” of the gRNA is complementary to the “target domain” on the target nucleic acid. The strand of the target nucleic acid comprising the nucleotide sequence complementary to the core domain of the gRNA is referred to herein as the “complementary strand” of the target nucleic acid. Guidance on the selection of targeting domains can be found, e.g., in Fu Y et al. (2014) NAT. BIOTECHNOL. 32: 279-84 (doi: 10.1038/nbt.2808) and Sternberg S H et al. (2014) NATURE 507: 62-7 (doi: 10.1038/nature13011).

[0371] In an embodiment, the targeting domain is 16, 17, 18, 19, 20, 21, 22, 23, 24, 25 or 26 nucleotides in length.

[0372] In an embodiment, the targeting domain is 16 nucleotides in length. In an embodiment, the targeting domain is 17 nucleotides in length. In an embodiment, the targeting domain is 18 nucleotides in length. In an embodiment, the targeting domain is 19 nucleotides in length. In an embodiment, the targeting domain is 20 nucleotides in length. In an embodiment, the targeting domain is 21 nucleotides in length. In an embodiment, the targeting domain is 22 nucleotides in length. In an embodiment, the targeting domain is 23 nucleotides in length. In an embodiment, the targeting domain is 24 nucleotides in length. In an embodiment, the targeting domain is 25 nucleotides in length. In an embodiment, the targeting domain is 26 nucleotides in length. In an embodiment, the targeting domain comprises 16 nucleotides. In an embodiment, the targeting domain comprises 17 nucleotides. In an embodiment, the targeting domain comprises 18 nucleotides. In an embodiment, the targeting domain comprises 19 nucleotides. In an embodiment, the targeting domain comprises 20 nucleotides. In an embodiment, the targeting domain comprises 21 nucleotides. In an embodiment, the targeting domain comprises 22 nucleotides. In an embodiment, the targeting domain comprises 23 nucleotides. In an embodiment, the targeting domain comprises 24 nucleotides. In an embodiment, the targeting domain comprises 25 nucleotides. In an embodiment, the targeting domain comprises 26 nucleotides.

[0373] In an embodiment, the targeting domain is 10+/−5, 20+/−5, 30+/−5, 40+/−5, 50+/−5, 60+/−5, 70+/−5, 80+/−5, 90+/−5, or 100+/−5 nucleotides, in length. In an embodiment, the targeting domain is 20+/−5 nucleotides in length. In an embodiment, the targeting domain is 20+/−10, 30+/−10, 40+/−10, 50+/−10, 60+/−10, 70+/−10, 80+/−10, 90+/−10, or 100+/−10 nucleotides, in length. In an embodiment, the targeting domain is 30+/−10 nucleotides in length. In an embodiment, the targeting domain is 10 to 100, 10 to 90, 10 to 80, 10 to 70, 10 to 60, 10 to 50, 10 to 40, 10 to 30, 10 to 20 or 10 to 15 nucleotides in length. In another embodiment, the targeting domain is 20 to 100, 20 to 90, 20 to 80, 20 to 70, 20 to 60, 20 to 50, 20 to 40, 20 to 30, or 20 to 25 nucleotides in length.

[0374] Typically the targeting domain has full complementarity with the target sequence. In an embodiment the targeting domain has or includes 1, 2, 3, 4, 5, 6, 7 or 8 nucleotides that are not complementary with the corresponding nucleotide of the targeting domain.

[0375] In an embodiment, the target domain includes 1, 2, 3, 4 or 5 nucleotides that are complementary with the corresponding nucleotide of the targeting domain within 5 nucleotides of its 5′ end. In an embodiment, the target domain includes 1, 2, 3, 4 or 5 nucleotides that are complementary with the corresponding nucleotide of the targeting domain within 5 nucleotides of its 3′ end.

[0376] In an embodiment, the target domain includes 1, 2, 3, or 4 nucleotides that are not complementary with the corresponding nucleotide of the targeting domain within 5 nucleotides of its 5′ end. In an embodiment, the target domain includes 1, 2, 3, or 4 nucleotides that are not complementary with the corresponding nucleotide of the targeting domain within 5 nucleotides of its 3′ end.

[0377] In an embodiment, the degree of complementarity, together with other properties of the gRNA, is sufficient to allow targeting of a Cas9 molecule to the target nucleic acid.

[0378] In an embodiment, the targeting domain comprises two consecutive nucleotides that are not complementary to the target domain (“non-complementary nucleotides”), e.g., two consecutive noncomplementary nucleotides that are within 5 nucleotides of the 5′ end of the targeting domain, within 5 nucleotides of the 3′ end of the targeting domain, or more than 5 nucleotides away from one or both ends of the targeting domain.

[0379] In an embodiment, no two consecutive nucleotides within 5 nucleotides of the 5′ end of the targeting domain, within 5 nucleotides of the 3′ end of the targeting domain, or within a region that is more than 5 nucleotides away from one or both ends of the targeting domain, are not complementary to the targeting domain.

[0380] In an embodiment, there are no non-complementary nucleotides within 5 nucleotides of the 5′ end of the targeting domain, within 5 nucleotides of the 3′ end of the targeting domain, or within a region that is more than 5 nucleotides away from one or both ends of the targeting domain.

[0381] In an embodiment, the targeting domain nucleotides do not comprise modifications, e.g., modifications of the type provided in Section X. However, in an embodiment, the targeting domain comprises one or more modifications, e.g., modifications that it render it less susceptible to degradation or more bio-compatible, e.g., less immunogenic. By way of example, the backbone of the targeting domain can be modified with a phosphorothioate, or other modification from Section X. In an embodiment, a nucleotide of the targeting domain can comprise a 2′ modification (e.g., a modification at the 2′ position on ribose), e.g., a 2-acetylation, e.g., a 2′ methylation, or other modification(s) from Section X.

[0382] In an embodiment, the targeting domain includes 1, 2, 3, 4, 5, 6, 7 or 8 or more modifications. In an embodiment, the targeting domain includes 1, 2, 3, or 4 modifications within 5 nucleotides of its 5′ end. In an embodiment, the targeting domain comprises as many as 1, 2, 3, or 4 modifications within 5 nucleotides of its 3′ end.

[0383] In an embodiment, the targeting domain comprises modifications at two consecutive nucleotides, e.g., two consecutive nucleotides that are within 5 nucleotides of the 5′ end of the targeting domain, within 5 nucleotides of the 3′ end of the targeting domain, or more than 5 nucleotides away from one or both ends of the targeting domain.

[0384] In an embodiment, no two consecutive nucleotides are modified within 5 nucleotides of the 5′ end of the targeting domain, within 5 nucleotides of the 3′ end of the targeting domain, or within a region that is more than 5 nucleotides away from one or both ends of the targeting domain. In an embodiment, no nucleotide is modified within 5 nucleotides of the 5′ end of the targeting domain, within 5 nucleotides of the 3′ end of the targeting domain, or within a region that is more than 5 nucleotides away from one or both ends of the targeting domain.

[0385] Modifications in the targeting domain can be selected to not interfere with targeting efficacy, which can be evaluated by testing a candidate modification in the system described in Section IV. gRNAs having a candidate targeting domain having a selected length, sequence, degree of complementarity, or degree of modification, can be evaluated in a system in Section IV. The candidate targeting domain can be placed, either alone, or with one or more other candidate changes in a gRNA molecule/Cas9 molecule system known to be functional with a selected target and evaluated.

[0386] In an embodiment, all of the modified nucleotides are complementary to and capable of hybridizing to corresponding nucleotides present in the target domain. In another embodiment, 1, 2, 3, 4, 5, 6, 7 or 8 or more modified nucleotides are not complementary to or capable of hybridizing to corresponding nucleotides present in the target domain.

[0387] In an embodiment, the targeting domain comprises, preferably in the 5′→3′ direction: a secondary domain and a core domain. These domains are discussed in more detail below.

[0388] Core Domain and Secondary Domain of the Targeting Domain

[0389] The “core domain” of the targeting domain is complementary to the “core domain target” on the target nucleic acid. In an embodiment, the core domain comprises about 8 to about 13 nucleotides from the 3′ end of the targeting domain (e.g., the most 3′ 8 to 13 nucleotides of the targeting domain).

[0390] In an embodiment, the core domain of the targeting domain and core domain target, are independently, 6+/−2, 7+/−2, 8+/−2, 9+/−2, 10+/−2, 11+/−2, 12+/−2, 13+/−2, 14+/−2, 15+/−2, or 16+−2, nucleotides in length.

[0391] In an embodiment, the core domain of the targeting domain and core domain target, are independently, 10+/−2 nucleotides in length.

[0392] In an embodiment, the core domain of the targeting domain and core domain target, are independently, 10+/−4 nucleotides in length.

[0393] In an embodiment, the core domain of the targeting domain and core domain target are independently 6, 7, 8, 9, 10, 11, 12, 13, 14, 15, 16, 17, or 18 nucleotides in length.

[0394] In an embodiment, the core domain of the targeting domain and core domain target are independently 3 to 20, 4 to 20, 5 to 20, 6 to 20, 7 to 20, 8 to 20, 9 to 20 10 to 20 or 15 to 20 nucleotides in length.

[0395] In an embodiment, the core domain of the targeting domain and core domain target are independently 3 to 15, e.g., 6 to 15, 7 to 14, 7 to 13, 6 to 12, 7 to 12, 7 to 11, 7 to 10, 8 to 14, 8 to 13, 8 to 12, 8 to 11, 8 to 10 or 8 to 9 nucleotides in length.

[0396] The core domain of the targeting domain is complementary with the core domain target. Typically the core domain has exact complementarity with the core domain target. In an embodiment, the core domain of the targeting domain can have 1, 2, 3, 4 or 5 nucleotides that are not complementary with the corresponding nucleotide of the core domain target. In an embodiment, the degree of complementarity, together with other properties of the gRNA molecule, is sufficient to allow targeting of a Cas9 molecule to the target nucleic acid.

[0397] The “secondary domain” of the targeting domain of the gRNA is complementary to the “secondary domain target” of the target nucleic acid.

[0398] In an embodiment, the secondary domain is positioned 5′ to the core domain.

[0399] In an embodiment, the secondary domain is absent or optional.

[0400] In an embodiment, if the targeting domain is 26 nucleotides in length and the core domain (counted from the 3′ end of the targeting domain) is 8 to 13 nucleotides in length, the secondary domain is 13 to 18 nucleotides in length.

[0401] In an embodiment, if the targeting domain is 25 nucleotides in length and the core domain (counted from the 3′ end of the targeting domain) is 8 to 13 nucleotides in length, the secondary domain is 12 to 17 nucleotides in length.

[0402] In an embodiment, if the targeting domain is 24 nucleotides in length and the core domain (counted from the 3′ end of the targeting domain) is 8 to 13 nucleotides in length, the secondary domain is 11 to 16 nucleotides in length.

[0403] In an embodiment, if the targeting domain is 23 nucleotides in length and the core domain (counted from the 3′ end of the targeting domain) is 8 to 13 nucleotides in length, the secondary domain is 10 to 15 nucleotides in length.

[0404] In an embodiment, if the targeting domain is 22 nucleotides in length and the core domain (counted from the 3′ end of the targeting domain) is 8 to 13 nucleotides in length, the secondary domain is 9 to 14 nucleotides in length.

[0405] In an embodiment, if the targeting domain is 21 nucleotides in length and the core domain (counted from the 3′ end of the targeting domain) is 8 to 13 nucleotides in length, the secondary domain is 8 to 13 nucleotides in length.

[0406] In an embodiment, if the targeting domain is 20 nucleotides in length and the core domain (counted from the 3′ end of the targeting domain) is 8 to 13 nucleotides in length, the secondary domain is 7 to 12 nucleotides in length.

[0407] In an embodiment, if the targeting domain is 19 nucleotides in length and the core domain (counted from the 3′ end of the targeting domain) is 8 to 13 nucleotides in length, the secondary domain is 6 to 11 nucleotides in length.

[0408] In an embodiment, if the targeting domain is 18 nucleotides in length and the core domain (counted from the 3′ end of the targeting domain) is 8 to 13 nucleotides in length, the secondary domain is 5 to 10 nucleotides in length.

[0409] In an embodiment, if the targeting domain is 17 nucleotides in length and the core domain (counted from the 3′ end of the targeting domain) is 8 to 13 nucleotides in length, the secondary domain is 4 to 9 nucleotides in length.

[0410] In an embodiment, if the targeting domain is 16 nucleotides in length and the core domain (counted from the 3′ end of the targeting domain) is 8 to 13 nucleotides in length, the secondary domain is 3 to 8 nucleotides in length.

[0411] In an embodiment, the secondary domain is 0, 1, 2, 3, 4, 5, 6, 7, 8, 9, 10, 11, 12, 13, 14, 15, 16, 17, or 18 nucleotides in length.

[0412] The secondary domain of the targeting domain is complementary with the secondary domain target. Typically, the secondary domain of the targeting domain has exact complementarity with the secondary domain target. In an embodiment the secondary domain of the targeting domain can have 1, 2, 3, 4 or 5 nucleotides that are not complementary with the corresponding nucleotide of the secondary domain target. In an embodiment, the degree of complementarity, together with other properties of the gRNA, is sufficient to allow targeting of a Cas9 molecule to the target nucleic acid.

[0413] In an embodiment, the core domain nucleotides do not comprise modifications, e.g., modifications of the type provided in Section X. However, in an embodiment, the core domain comprises one or more modifications, e.g., modifications that it render it less susceptible to degradation or more bio-compatible, e.g., less immunogenic. By way of example, the backbone of the core domain can be modified with a phosphorothioate, or other modification(s) from Section X. In an embodiment a nucleotide of the core domain can comprise a 2′ modification (e.g., a modification at the 2′ position on ribose), e.g., a 2-acetylation, e.g., a 2′ methylation, or other modification(s) from Section X. Typically, a core domain will contain no more than 1, 2, or 3 modifications.

[0414] Modifications in the core domain can be selected to not interfere with targeting efficacy, which can be evaluated by testing a candidate modification in the system described in Section IV. gRNAs having a candidate core domain having a selected length, sequence, degree of complementarity, or degree of modification, can be evaluated in the system described at Section IV. The candidate core domain can be placed, either alone, or with one or more other candidate changes in a gRNA molecule/Cas9 molecule system known to be functional with a selected target and evaluated.

[0415] In an embodiment, the secondary domain nucleotides do not comprise modifications, e.g., modifications of the type provided in Section X. However, in an embodiment, the secondary domain comprises one or more modifications, e.g., modifications that render it less susceptible to degradation or more bio-compatible, e.g., less immunogenic. By way of example, the backbone of the secondary domain can be modified with a phosphorothioate, or other modification(s) from Section X. In an embodiment a nucleotide of the secondary domain can comprise a 2′ modification (e.g., a modification at the 2′ position on ribose), e.g., a 2-acetylation, e.g., a 2′ methylation, or other modification from Section X.

[0416] Modifications in the secondary domain can be selected to not interfere with targeting efficacy, which can be evaluated by testing a candidate modification in the system described in Section IV. gRNAs having a candidate secondary domain having a selected length, sequence, degree of complementarity, or degree of modification, can be evaluated in the system described at Section IV. The candidate secondary domain can be placed, either alone, or with one or more other candidate changes in a gRNA molecule/Cas9 molecule system known to be functional with a selected target and evaluated.

[0417] In an embodiment, (1) the degree of complementarity between the core domain of the targeting domain and its target (i.e., the core domain target), and (2) the degree of complementarity between the secondary domain of the targeting domain and its target (i.e., the secondary domain target), may differ. In an embodiment, (1) may be greater than (2). In an embodiment, (1) may be less than (2). In an embodiment, (1) and (2) are the same, e.g., each may be completely complementary with its target.

[0418] In an embodiment, (1) the number of modifications (e.g., modifications from Section X) of the nucleotides of the core domain and (2) the number of modification (e.g., modifications from Section X) of the nucleotides of the secondary domain, may differ. In an embodiment, (1) may be less than (2). In an embodiment, (1) may be greater than (2). In an embodiment, (1) and (2) may be the same, e.g., each may be free of modifications.

[0419] First and Second Complementarity Domains

[0420] The first complementarity domain is complementary with the second complementarity domain.

[0421] Typically the first domain does not have exact complementarity with the second complementarity domain. In an embodiment, the first complementarity domain can have 1, 2, 3, 4 or 5 nucleotides that are not complementary with the corresponding nucleotide of the second complementarity domain. In an embodiment, 1, 2, 3, 4, 5 or 6, e.g., 3 nucleotides, will not pair in the duplex, and, e.g., form a non-duplexed or looped-out region. In an embodiment, an unpaired, or loop-out, region, e.g., a loop-out of 3 nucleotides, is present on the second complementarity domain. In an embodiment, the unpaired region begins 1, 2, 3, 4, 5, or 6, e.g., 4, nucleotides from the 5′ end of the second complementarity domain.

[0422] In an embodiment, the degree of complementarity, together with other properties of the gRNA, is sufficient to allow targeting of a Cas9 molecule to the target nucleic acid.

[0423] In an embodiment, the first and second complementarity domains are:
[0424] independently, 6+/−2, 7+/−2, 8+/−2, 9+/−2, 10+/−2, 11+/−2, 12+/−2, 13+/−2, 14+/−2, 15+/−2, 16+/−2, 17+/−2, 18+/−2, 19+/−2, or 20+/−2, 21+/−2, 22+/−2, 23+/−2, or 24+/−2 nucleotides in length;
[0425] independently, 6, 7, 8, 9, 10, 11, 12, 13, 14, 14, 16, 17, 18, 19, 20, 21, 22, 23, 24, 25, or 26 nucleotides in length; or
[0426] independently, 5 to 24, 5 to 23, 5 to 22, 5 to 21, 5 to 20, 7 to 18, 9 to 16, or 10 to 14 nucleotides in length.

[0427] In an embodiment, the second complementarity domain is longer than the first complementarity domain, e.g., 2, 3, 4, 5, or 6, e.g., 6, nucleotides longer.

[0428] In an embodiment, the first and second complementary domains, independently, do not comprise modifications, e.g., modifications of the type provided in Section X.

[0429] In an embodiment, the first and second complementary domains, independently, comprise one or more modifications, e.g., modifications that the render the domain less susceptible to degradation or more bio-compatible, e.g., less immunogenic. By way of example, the backbone of the domain can be modified with a phosphorothioate, or other modification(s) from Section X. In an embodiment a nucleotide of the domain can comprise a 2′ modification (e.g., a modification at the 2′ position on ribose), e.g., a 2-acetylation, e.g., a 2′ methylation, or other modification(s) from Section X.

[0430] In an embodiment, the first and second complementary domains, independently, include 1, 2, 3, 4, 5, 6, 7 or 8 or more modifications. In an embodiment, the first and second complementary domains, independently, include 1, 2, 3, or 4 modifications within 5 nucleotides of its 5′ end. In an embodiment, the first and second complementary domains, independently, include as many as 1, 2, 3, or 4 modifications within 5 nucleotides of its 3′ end.

[0431] In an embodiment, the first and second complementary domains, independently, include modifications at two consecutive nucleotides, e.g., two consecutive nucleotides that are within 5 nucleotides of the 5′ end of the domain, within 5 nucleotides of the 3′ end of the domain, or more than 5 nucleotides away from one or both ends of the domain. In an embodiment, the first and second complementary domains, independently, include no two consecutive nucleotides that are modified, within 5 nucleotides of the 5′ end of the domain, within 5 nucleotides of the 3′ end of the domain, or within a region that is more than 5 nucleotides away from one or both ends of the domain. In an embodiment, the first and second complementary domains, independently, include no nucleotide that is modified within 5 nucleotides of the 5′ end of the domain, within 5 nucleotides of the 3′ end of the domain, or within a region that is more than 5 nucleotides away from one or both ends of the domain.

[0432] Modifications in a complementarity domain can be selected to not interfere with targeting efficacy, which can be evaluated by testing a candidate modification in the system described in Section IV. gRNAs having a candidate complementarity domain having a selected length, sequence, degree of complementarity, or degree of modification, can be evaluated in the system described in Section IV. The candidate complementarity domain can be placed, either alone, or with one or more other candidate changes in a gRNA molecule/Cas9 molecule system known to be functional with a selected target and evaluated.

[0433] In an embodiment, the first complementarity domain has at least 60, 70, 80, 81, 82, 83, 84, 85, 86, 87, 88, 89, 90, 91, 92, 93, 94, 95, 96, 97, 98, 99% homology with, or differs by no more than 1, 2, 3, 4, 5, or 6 nucleotides from, a reference first complementarity domain, e.g., a naturally occurring, e.g., an S. pyogenes, S. aureus or S. thermophilus, first complementarity domain, or a first complementarity domain described herein.

[0434] In an embodiment, the second complementarity domain has at least 60, 70, 80, 81, 82, 83, 84, 85, 86, 87, 88, 89, 90, 91, 92, 93, 94, 95, 96, 97, 98, 99% homology with, or differs by no more than 1, 2, 3, 4, 5, or 6 nucleotides from, a reference second complementarity domain, e.g., a naturally occurring, e.g., an S. pyogenes, S. aureus or S. thermophilus, second complementarity domain, or a second complementarity domain described herein.

[0435] The duplexed region formed by first and second complementarity domains is typically 6, 7, 8, 9, 10, 11, 12, 13, 14, 15, 16, 17, 18, 19, 20, 21 or 22 base pairs in length (excluding any looped out or unpaired nucleotides).

[0436] In an embodiment, the first and second complementarity domains, when duplexed, comprise 11 paired nucleotides, for example, in the gRNA sequence (one paired strand underlined, one bolded):

(SEQ ID NO: 1)
NNNNNNNNNNNNNNNNNNNNGUUUUAGAGCUAGAAAUAGCAAGUUAAAAU
AAGGCUAGUCCGUUAUCAACUUGAAAAAGUGGCACCGAGUCGGUGC.

[0437] In an embodiment, the first and second complementarity domains, when duplexed, comprise 15 paired nucleotides, for example in the gRNA sequence (one paired strand underlined, one bolded):

(SEQ ID NO: 2)
NNNNNNNNNNNNNNNNNNNNGUUUUAGAGCUAUGCUGAAAAGCAUAGCAA
GUUAAAAUAAGGCUAGUCCGUUAUCAACUUGAAAAAGUGGCACCGAGUCG
GUGC.

[0438] In an embodiment the first and second complementarity domains, when duplexed, comprise 16 paired nucleotides, for example in the gRNA sequence (one paired strand underlined, one bolded):

(SEQ ID NO: 3)
NNNNNNNNNNNNNNNNNNNNGUUUUAGAGCUAUGCUGGAAACAGCAUAGC
AAGUUAAAAUAAGGCUAGUCCGUUAUCAACUUGAAAAAGUGGCACCGAGU
CGGUGC.

[0439] In an embodiment the first and second complementarity domains, when duplexed, comprise 21 paired nucleotides, for example in the gRNA sequence (one paired strand underlined, one bolded):

(SEQ ID NO: 4)
NNNNNNNNNNNNNNNNNNNNGUUUUAGAGCUAUGCUGUUUUGGAAACAAA
ACAGCAUAGCAAGUUAAAAUAAGGCUAGUCCGUUAUCAACUUGAAAAAGU
GGCACCGAGUCGGUGC.

[0440] In an embodiment, nucleotides are exchanged to remove poly-U tracts, for example in the gRNA sequences (exchanged nucleotides underlined):

(SEQ ID NO: 5)
NNNNNNNNNNNNNNNNNNNNGUAUUAGAGCUAGAAAUAGCAAGUUAAUAU
AAGGCUAGUCCGUUAUCAACUUGAAAAAGUGGCACCGAGUCGGUGC;
(SEQ ID NO: 91)
NNNNNNNNNNNNNNNNNNNNGUUUAAGAGCUAGAAAUAGCAAGUUUAAAU
AAGGCUAGUCCGUUAUCAACUUGAAAAAGUGGCACCGAGUCGGUGC;
or
(SEQ ID NO: 92)
NNNNNNNNNNNNNNNNNNNNGUAUUAGAGCUAUGCUGUAUUGGAAACAAU
ACAGCAUAGCAAGUUAAUAUAAGGCUAGUCCGUUAUCAACUUGAAAAAGU
GGCACCGAGUCGGUGC.

[0441] 5′ Extension Domain

[0442] In an embodiment, a modular gRNA can comprise additional sequence, 5′ to the second complementarity domain. In an embodiment, the 5′ extension domain is 2 to 10, 2 to 9, 2 to 8, 2 to 7, 2 to 6, 2 to 5, or 2 to 4 nucleotides in length. In an embodiment, the 5′ extension domain is 2, 3, 4, 5, 6, 7, 8, 9, or 10 or more nucleotides in length.

[0443] In an embodiment, the 5′ extension domain nucleotides do not comprise modifications, e.g., modifications of the type provided in Section X. However, in an embodiment, the 5′ extension domain comprises one or more modifications, e.g., modifications that it render it less susceptible to degradation or more bio-compatible, e.g., less immunogenic. By way of example, the backbone of the 5′ extension domain can be modified with a phosphorothioate, or other modification(s) from Section X. In an embodiment, a nucleotide of the 5′ extension domain can comprise a 2′ modification (e.g., a modification at the 2′ position on ribose), e.g., a 2-acetylation, e.g., a 2′ methylation, or other modification(s) from Section X.

[0444] In an embodiment, the 5′ extension domain can comprise as many as 1, 2, 3, 4, 5, 6, 7 or 8 modifications. In an embodiment, the 5′ extension domain comprises as many as 1, 2, 3, or 4 modifications within 5 nucleotides of its 5′ end, e.g., in a modular gRNA molecule. In an embodiment, the 5′ extension domain comprises as many as 1, 2, 3, or 4 modifications within 5 nucleotides of its 3′ end, e.g., in a modular gRNA molecule.

[0445] In an embodiment, the 5′ extension domain comprises modifications at two consecutive nucleotides, e.g., two consecutive nucleotides that are within 5 nucleotides of the 5′ end of the 5′ extension domain, within 5 nucleotides of the 3′ end of the 5′ extension domain, or more than 5 nucleotides away from one or both ends of the 5′ extension domain. In an embodiment, no two consecutive nucleotides are modified within 5 nucleotides of the 5′ end of the 5′ extension domain, within 5 nucleotides of the 3′ end of the 5′ extension domain, or within a region that is more than 5 nucleotides away from one or both ends of the 5′ extension domain. In an embodiment, no nucleotide is modified within 5 nucleotides of the 5′ end of the 5′ extension domain, within 5 nucleotides of the 3′ end of the 5′ extension domain, or within a region that is more than 5 nucleotides away from one or both ends of the 5′ extension domain.

[0446] Modifications in the 5′ extension domain can be selected so as to not interfere with gRNA molecule efficacy, which can be evaluated by testing a candidate modification in the system described in Section IV. gRNAs having a candidate 5′ extension domain having a selected length, sequence, degree of complementarity, or degree of modification, can be evaluated in the system described at Section IV. The candidate 5′ extension domain can be placed, either alone, or with one or more other candidate changes in a gRNA molecule/Cas9 molecule system known to be functional with a selected target and evaluated.

[0447] In an embodiment, the 5′ extension domain has at least 60, 70, 80, 81, 82, 83, 84, 85, 86, 87, 88, 89, 90, 91, 92, 93, 94, 95, 96, 97, 98, 99% homology with, or differs by no more than 1, 2, 3, 4, 5, or 6 nucleotides from, a reference 5′ extension domain, e.g., a naturally occurring, e.g., an S. pyogenes, S. aureus or S. thermophilus, 5′ extension domain, or a 5′ extension domain described herein.

[0448] Linking Domain

[0449] In a unimolecular gRNA molecule the linking domain is disposed between the first and second complementarity domains. In a modular gRNA molecule, the two molecules are associated with one another by the complementarity domains.

[0450] In an embodiment, the linking domain is 10+/−5, 20+/−5, 30+/−5, 40+/−5, 50+/−5, 60+/−5, 70+/−5, 80+/−5, 90+/−5, or 100+/−5 nucleotides, in length.

[0451] In an embodiment, the linking domain is 20+/−10, 30+/−10, 40+/−10, 50+/−10, 60+/−10, 70+/−10, 80+/−10, 90+/−10, or 100+/−10 nucleotides, in length.

[0452] In an embodiment, the linking domain is 10 to 100, 10 to 90, 10 to 80, 10 to 70, 10 to 60, 10 to 50, 10 to 40, 10 to 30, 10 to 20 or 10 to 15 nucleotides in length.

[0453] In another embodiment, the linking domain is 20 to 100, 20 to 90, 20 to 80, 20 to 70, 20 to 60, 20 to 50, 20 to 40, 20 to 30, or 20 to 25 nucleotides in length.

[0454] In an embodiment, the linking domain is 1, 2, 3, 4, 5, 6, 7, 8, 9, 10, 11, 12, 13, 14, 15, 16 17, 18, 19, or 20 nucleotides in length.

[0455] In and embodiment, the linking domain is a covalent bond.

[0456] In an embodiment, the linking domain comprises a duplexed region, typically adjacent to or within 1, 2, or 3 nucleotides of the 3′ end of the first complementarity domain and/or the 5-end of the second complementarity domain. In an embodiment, the duplexed region can be 20+/−10 base pairs in length. In an embodiment, the duplexed region can be 10+/−5, 15+/−5, 20+/−5, or 30+/−5 base pairs in length. In an embodiment, the duplexed region can be 1, 2, 3, 4, 5, 6, 7, 8, 9, 10, 11, 12, 13, 14, or 15 base pairs in length.

[0457] Typically the sequences forming the duplexed region have exact complementarity with one another, though in an embodiment as many as 1, 2, 3, 4, 5, 6, 7 or 8 nucleotides are not complementary with the corresponding nucleotides.

[0458] In an embodiment, the linking domain nucleotides do not comprise modifications, e.g., modifications of the type provided in Section X. However, in an embodiment, the linking domain comprises one or more modifications, e.g., modifications that it render it less susceptible to degradation or more bio-compatible, e.g., less immunogenic. By way of example, the backbone of the linking domain can be modified with a phosphorothioate, or other modification(s) from Section X. In an embodiment a nucleotide of the linking domain can comprise a 2′ modification (e.g., a modification at the 2′ position on ribose), e.g., a 2-acetylation, e.g., a 2′ methylation, or other modification(s) from Section X. In an embodiment, the linking domain can comprise as many as 1, 2, 3, 4, 5, 6, 7 or 8 modifications.

[0459] Modifications in a linking domain can be selected so as to not interfere with targeting efficacy, which can be evaluated by testing a candidate modification in the system described in Section IV. gRNAs having a candidate linking domain having a selected length, sequence, degree of complementarity, or degree of modification, can be evaluated a system described in Section IV. A candidate linking domain can be placed, either alone, or with one or more other candidate changes in a gRNA molecule/Cas9 molecule system known to be functional with a selected target and evaluated.

[0460] In an embodiment, the linking domain has at least 60, 70, 80, 81, 82, 83, 84, 85, 86, 87, 88, 89, 90, 91, 92, 93, 94, 95, 96, 97, 98, 99% homology with, or differs by no more than 1, 2, 3, 4, 5, or 6 nucleotides from, a reference linking domain, e.g., a linking domain described herein.

[0461] Proximal Domain

[0462] In an embodiment, the proximal domain is 6+/−2, 7+/−2, 8+/−2, 9+/−2, 10+/−2, 11+/−2, 12+/−2, 13+/−2, 14+/−2, 14+/−2, 16+/−2, 17+/−2, 18+/−2, 19+/−2, or 20+/−2 nucleotides in length.

[0463] In an embodiment, the proximal domain is 6, 7, 8, 9, 10, 11, 12, 13, 14, 15, 16, 17, 18, 19, 20, 21, 22, 23, 24, 25 or 26 nucleotides in length.

[0464] In an embodiment, the proximal domain is 5 to 20, 7, to 18, 9 to 16, or 10 to 14 nucleotides in length.

[0465] In an embodiment, the proximal domain nucleotides do not comprise modifications, e.g., modifications of the type provided in Section X. However, in an embodiment, the proximal domain comprises one or more modifications, e.g., modifications that it render it less susceptible to degradation or more bio-compatible, e.g., less immunogenic. By way of example, the backbone of the proximal domain can be modified with a phosphorothioate, or other modification(s) from Section X. In an embodiment a nucleotide of the proximal domain can comprise a 2′ modification (e.g., a modification at the 2′ position on ribose), e.g., a 2-acetylation, e.g., a 2′ methylation, or other modification(s) from Section X.

[0466] In an embodiment, the proximal domain can comprise as many as 1, 2, 3, 4, 5, 6, 7 or 8 modifications. In an embodiment, the proximal domain comprises as many as 1, 2, 3, or 4 modifications within 5 nucleotides of its 5′ end, e.g., in a modular gRNA molecule. In an embodiment, the target domain comprises as many as 1, 2, 3, or 4 modifications within 5 nucleotides of its 3′ end, e.g., in a modular gRNA molecule.

[0467] In an embodiment, the proximal domain comprises modifications at two consecutive nucleotides, e.g., two consecutive nucleotides that are within 5 nucleotides of the 5′ end of the proximal domain, within 5 nucleotides of the 3′ end of the proximal domain, or more than 5 nucleotides away from one or both ends of the proximal domain. In an embodiment, no two consecutive nucleotides are modified within 5 nucleotides of the 5′ end of the proximal domain, within 5 nucleotides of the 3′ end of the proximal domain, or within a region that is more than 5 nucleotides away from one or both ends of the proximal domain. In an embodiment, no nucleotide is modified within 5 nucleotides of the 5′ end of the proximal domain, within 5 nucleotides of the 3′ end of the proximal domain, or within a region that is more than 5 nucleotides away from one or both ends of the proximal domain.

[0468] Modifications in the proximal domain can be selected so as to not interfere with gRNA molecule efficacy, which can be evaluated by testing a candidate modification in the system described in Section IV. gRNAs having a candidate proximal domain having a selected length, sequence, degree of complementarity, or degree of modification, can be evaluated in the system described at Section IV. The candidate proximal domain can be placed, either alone, or with one or more other candidate changes in a gRNA molecule/Cas9 molecule system known to be functional with a selected target and evaluated.

[0469] In an embodiment, the proximal domain has at least 60, 70, 80, 81, 82, 83, 84, 85, 86, 87, 88, 89, 90, 91, 92, 93, 94, 95, 96, 97, 98, 99% homology with, or differs by no more than 1, 2, 3, 4, 5, or 6 nucleotides from, a reference proximal domain, e.g., a naturally occurring, e.g., an S. pyogenes, S. aureus or S. thermophilus, proximal domain, or a proximal domain described herein.

[0470] Tail Domain

[0471] In an embodiment, the tail domain is 10+/−5, 20+/−5, 30+/−5, 40+/−5, 50+/−5, 60+/−5, 70+/−5, 80+/−5, 90+/−5, or 100+/−5 nucleotides, in length.

[0472] In an embodiment, the tail domain is 20+/−5 nucleotides in length.

[0473] In an embodiment, the tail domain is 20+/−10, 30+/−10, 40+/−10, 50+/−10, 60+/−10, 70+/−10, 80+/−10, 90+/−10, or 100+/−10 nucleotides, in length.

[0474] In an embodiment, the tail domain is 25+/−10 nucleotides in length.

[0475] In an embodiment, the tail domain is 10 to 100, 10 to 90, 10 to 80, 10 to 70, 10 to 60, 10 to 50, 10 to 40, 10 to 30, 10 to 20 or 10 to 15 nucleotides in length.

[0476] In another embodiment, the tail domain is 20 to 100, 20 to 90, 20 to 80, 20 to 70, 20 to 60, 20 to 50, 20 to 40, 20 to 30, or 20 to 25 nucleotides in length.

[0477] In an embodiment, the tail domain is 1 to 20, 1 to 15, 1 to 10, or 1 to 5 nucleotides in length.

[0478] In an embodiment, the tail domain nucleotides do not comprise modifications, e.g., modifications of the type provided in Section X. However, in an embodiment, the tail domain comprises one or more modifications, e.g., modifications that it render it less susceptible to degradation or more bio-compatible, e.g., less immunogenic. By way of example, the backbone of the tail domain can be modified with a phosphorothioate, or other modification(s) from Section X. In an embodiment, a nucleotide of the tail domain can comprise a 2′ modification (e.g., a modification at the 2′ position on ribose), e.g., a 2-acetylation, e.g., a 2′ methylation, or other modification(s) from Section X.

[0479] In an embodiment, the tail domain can have as many as 1, 2, 3, 4, 5, 6, 7 or 8 modifications. In an embodiment, the target domain comprises as many as 1, 2, 3, or 4 modifications within 5 nucleotides of its 5′ end. In an embodiment, the target domain comprises as many as 1, 2, 3, or 4 modifications within 5 nucleotides of its 3′ end.

[0480] In an embodiment, the tail domain comprises a tail duplex domain, which can form a tail duplexed region. In an embodiment, the tail duplexed region can be 3, 4, 5, 6, 7, 8, 9, 10, 11, or 12 base pairs in length. In an embodiment, a further single stranded domain, exists 3′ to the tail duplexed domain. In an embodiment, this domain is 3, 4, 5, 6, 7, 8, 9, or 10 nucleotides in length. In an embodiment it is 4 to 6 nucleotides in length.

[0481] In an embodiment, the tail domain has at least 60, 70, 80, 81, 82, 83, 84, 85, 86, 87, 88, 89, 90, 91, 92, 93, 94, 95, 96, 97, 98, 99% homology with, or differs by no more than 1, 2, 3, 4, 5, or 6 nucleotides from, a reference tail domain, e.g., a naturally occurring, e.g., an S. pyogenes, S. aureus or S. thermophilus, tail domain, or a tail domain described herein.

[0482] In an embodiment, the proximal and tail domain, taken together comprise the following sequences:

(SEQ ID NO: 100)
AAGGCUAGUCCGUUAUCAACUUGAAAAAGUGGCACCGAGUCGGUGCU,
or
(SEQ ID NO: 101)
AAGGCUAGUCCGUUAUCAACUUGAAAAAGUGGCACCGAGUCGGUGGUGC,
or
(SEQ ID NO: 102)
AAGGCUAGUCCGUUAUCAACUUGAAAAAGUGGCACCGAGUCGGUGCGGAU
C,
or
(SEQ ID NO: 103)
AAGGCUAGUCCGUUAUCAACUUGAAAAAGUG,
or
(SEQ ID NO: 104)
AAGGCUAGUCCGUUAUCA,
or
(SEQ ID NO: 105)
AAGGCUAGUCCG.

[0483] In an embodiment, the tail domain comprises the 3′ sequence UUUUUU, e.g., if a U6 promoter is used for transcription.

[0484] In an embodiment, the tail domain comprises the 3′ sequence UUUU, e.g., if an H1 promoter is used for transcription.

[0485] In an embodiment, tail domain comprises variable numbers of 3′ Us depending, e.g., on the termination signal of the pol-III promoter used.

[0486] In an embodiment, the tail domain comprises variable 3′ sequence derived from the DNA template if a T7 promoter is used.

[0487] In an embodiment, the tail domain comprises variable 3′ sequence derived from the DNA template, e.g., if in vitro transcription is used to generate the RNA molecule.

[0488] In an embodiment, the tail domain comprises variable 3′ sequence derived from the DNA template, e.g., if a pol-II promoter is used to drive transcription.

[0489] Modifications in the tail domain can be selected to not interfere with targeting efficacy, which can be evaluated by testing a candidate modification in the system described in Section IV. gRNAs having a candidate tail domain having a selected length, sequence, degree of complementarity, or degree of modification, can be evaluated in the system described in Section IV. The candidate tail domain can be placed, either alone, or with one or more other candidate changes in a gRNA molecule/Cas9 molecule system known to be functional with a selected target and evaluated.

[0490] In an embodiment, the tail domain comprises modifications at two consecutive nucleotides, e.g., two consecutive nucleotides that are within 5 nucleotides of the 5′ end of the tail domain, within 5 nucleotides of the 3′ end of the tail domain, or more than 5 nucleotides away from one or both ends of the tail domain. In an embodiment, no two consecutive nucleotides are modified within 5 nucleotides of the 5′ end of the tail domain, within 5 nucleotides of the 3′ end of the tail domain, or within a region that is more than 5 nucleotides away from one or both ends of the tail domain. In an embodiment, no nucleotide is modified within 5 nucleotides of the 5′ end of the tail domain, within 5 nucleotides of the 3′ end of the tail domain, or within a region that is more than 5 nucleotides away from one or both ends of the tail domain.

[0491] In an embodiment a gRNA has the following structure:
[0492] 5′ [targeting domain]-[first complementarity domain]-[linking domain]-[second complementarity domain]-[proximal domain]-[tail domain]-3′
[0493] wherein, the targeting domain comprises a core domain and optionally a secondary domain, and is 10 to 50 nucleotides in length;
[0494] the first complementarity domain is 5 to 25 nucleotides in length and, In an embodiment has at least 50, 60, 70, 80, 81, 82, 83, 84, 85, 86, 87, 88, 89, 90, 91, 92, 93, 94, 95, 96, 97, 98, 99% homology with a reference first complementarity domain disclosed herein;
[0495] the linking domain is 1 to 5 nucleotides in length;
[0496] the second complementarity domain is 5 to 27 nucleotides in length and, in an embodiment has at least 50, 60, 70, 80, 81, 82, 83, 84, 85, 86, 87, 88, 89, 90, 91, 92, 93, 94, 95, 96, 97, 98, 99% homology with a reference second complementarity domain disclosed herein;
[0497] the proximal domain is 5 to 20 nucleotides in length and, in an embodiment has at least 50, 60, 70, 80, 81, 82, 83, 84, 85, 86, 87, 88, 89, 90, 91, 92, 93, 94, 95, 96, 97, 98, 99% homology with a reference proximal domain disclosed herein; and
[0498] the tail domain is absent or a nucleotide sequence is 1 to 50 nucleotides in length and, in an embodiment has at least 60, 70, 80, 81, 82, 83, 84, 85, 86, 87, 88, 89, 90, 91, 92, 93, 94, 95, 96, 97, 98, 99% homology with a reference tail domain disclosed herein.

[0499] Exemplary Chimeric gRNAs

[0500] In an embodiment, a unimolecular, or chimeric, gRNA comprises, preferably from 5′ to 3′:
[0501] a targeting domain (which is complementary to a target nucleic acid);
[0502] a first complementarity domain, e.g., comprising 15, 16, 17, 18, 19, 20, 21, 22, 23, 24, 25, or 26 nucleotides;
[0503] a linking domain;
[0504] a second complementarity domain (which is complementary to the first complementarity domain);
[0505] a proximal domain; and
[0506] a tail domain,
[0507] wherein,
[0508] (a) the proximal and tail domain, when taken together, comprise at least 15, 18, 20, 25, 30, 31, 35, 40, 45, 49, 50, or 53 nucleotides;
[0509] (b) there are at least 15, 18, 20, 25, 30, 31, 35, 40, 45, 49, 50, or 53 nucleotides 3′ to the last nucleotide of the second complementarity domain; or
[0510] (c) there are at least 16, 19, 21, 26, 31, 32, 36, 41, 46, 50, 51, or 54 nucleotides 3′ to the last nucleotide of the second complementarity domain that is complementary to its corresponding nucleotide of the first complementarity domain.

[0511] In an embodiment, the sequence from (a), (b), or (c), has at least 60, 70, 80, 81, 82, 83, 84, 85, 86, 87, 88, 89, 90, 91, 92, 93, 94, 95, 96, 97, 98, 99% homology with the corresponding sequence of a naturally occurring gRNA, or with a gRNA described herein.

[0512] In an embodiment, the proximal and tail domain, when taken together, comprise at least 15, 18, 20, 25, 30, 31, 35, 40, 45, 49, 50, or 53 nucleotides.

[0513] In an embodiment, there are at least 15, 18, 20, 25, 30, 31, 35, 40, 45, 49, 50, or 53 nucleotides 3′ to the last nucleotide of the second complementarity domain.

[0514] In an embodiment, there are at least 16, 19, 21, 26, 31, 32, 36, 41, 46, 50, 51, or 54 nucleotides 3′ to the last nucleotide of the second complementarity domain that is complementary to its corresponding nucleotide of the first complementarity domain.

[0515] In an embodiment, the targeting domain comprises, has, or consists of, 16, 17, 18, 19, 20, 21, 22, 23, 24, 25 or 26 nucleotides (e.g., 16, 17, 18, 19, 20, 21, 22, 23, 24, 25 or 26 consecutive nucleotides) having complementarity with the target domain, e.g., the targeting domain is 16, 17, 18, 19, 20, 21, 22, 23, 24, 25, or 26 nucleotides in length.

[0516] In an embodiment, the targeting domain comprises, has, or consists of, 16 nucleotides (e.g., 16 consecutive nucleotides) having complementarity with the target domain, e.g., the targeting domain is 16 nucleotides in length.

[0517] In an embodiment, the targeting domain comprises, has, or consists of, 17 nucleotides (e.g., 17 consecutive nucleotides) having complementarity with the target domain, e.g., the targeting domain is 17 nucleotides in length.

[0518] In an embodiment, the targeting domain comprises, has, or consists of, 18 nucleotides (e.g., 18 consecutive nucleotides) having complementarity with the target domain, e.g., the targeting domain is 18 nucleotides in length.

[0519] In an embodiment, the targeting domain comprises, has, or consists of, 19 nucleotides (e.g., 19 consecutive nucleotides) having complementarity with the target domain, e.g., the targeting domain is 19 nucleotides in length.

[0520] In an embodiment, the targeting domain comprises, has, or consists of, 20 nucleotides (e.g., 20 consecutive nucleotides) having complementarity with the target domain, e.g., the targeting domain is 20 nucleotides in length.

[0521] In an embodiment, the targeting domain comprises, has, or consists of, 21 nucleotides (e.g., 21 consecutive nucleotides) having complementarity with the target domain, e.g., the targeting domain is 21 nucleotides in length.

[0522] In an embodiment, the targeting domain comprises, has, or consists of, 22 nucleotides (e.g., 22 consecutive nucleotides) having complementarity with the target domain, e.g., the targeting domain is 22 nucleotides in length.

[0523] In an embodiment, the targeting domain comprises, has, or consists of, 23 nucleotides (e.g., 23 consecutive nucleotides) having complementarity with the target domain, e.g., the targeting domain is 23 nucleotides in length.

[0524] In an embodiment, the targeting domain comprises, has, or consists of, 24 nucleotides (e.g., 24 consecutive nucleotides) having complementarity with the target domain, e.g., the targeting domain is 24 nucleotides in length.

[0525] In an embodiment, the targeting domain comprises, has, or consists of, 25 nucleotides (e.g., 25 consecutive nucleotides) having complementarity with the target domain, e.g., the targeting domain is 25 nucleotides in length.

[0526] In an embodiment, the targeting domain comprises, has, or consists of, 26 nucleotides (e.g., 26 consecutive nucleotides) having complementarity with the target domain, e.g., the targeting domain is 26 nucleotides in length.

[0527] In an embodiment, the targeting domain comprises, has, or consists of, 16 nucleotides (e.g., 16 consecutive nucleotides) having complementarity with the target domain, e.g., the targeting domain is 16 nucleotides in length; and the proximal and tail domain, when taken together, comprise at least 15, 18, 20, 25, 30, 31, 35, 40, 45, 49, 50, or 53 nucleotides.

[0528] In an embodiment, the targeting domain comprises, has, or consists of, 16 nucleotides (e.g., 16 consecutive nucleotides) having complementarity with the target domain, e.g., the targeting domain is 16 nucleotides in length; and there are at least 15, 18, 20, 25, 30, 31, 35, 40, 45, 49, 50, or 53 nucleotides 3′ to the last nucleotide of the second complementarity domain.

[0529] In an embodiment, the targeting domain comprises, has, or consists of, 16 nucleotides (e.g., 16 consecutive nucleotides) having complementarity with the target domain, e.g., the targeting domain is 16 nucleotides in length; and there are at least 16, 19, 21, 26, 31, 32, 36, 41, 46, 50, 51, or 54 nucleotides 3′ to the last nucleotide of the second complementarity domain that is complementary to its corresponding nucleotide of the first complementarity domain.

[0530] In an embodiment, the targeting domain comprises, has, or consists of, 17 nucleotides (e.g., 17 consecutive nucleotides) having complementarity with the target domain, e.g., the targeting domain is 17 nucleotides in length; and the proximal and tail domain, when taken together, comprise at least 15, 18, 20, 25, 30, 31, 35, 40, 45, 49, 50, or 53 nucleotides.

[0531] In an embodiment, the targeting domain comprises, has, or consists of, 17 nucleotides (e.g., 17 consecutive nucleotides) having complementarity with the target domain, e.g., the targeting domain is 17 nucleotides in length; and there are at least 15, 18, 20, 25, 30, 31, 35, 40, 45, 49, 50, or 53 nucleotides 3′ to the last nucleotide of the second complementarity domain.

[0532] In an embodiment, the targeting domain comprises, has, or consists of, 17 nucleotides (e.g., 17 consecutive nucleotides) having complementarity with the target domain, e.g., the targeting domain is 17 nucleotides in length; and there are at least 16, 19, 21, 26, 31, 32, 36, 41, 46, 50, 51, or 54 nucleotides 3′ to the last nucleotide of the second complementarity domain that is complementary to its corresponding nucleotide of the first complementarity domain.

[0533] In an embodiment, the targeting domain comprises, has, or consists of, 18 nucleotides (e.g., 18 consecutive nucleotides) having complementarity with the target domain, e.g., the targeting domain is 18 nucleotides in length; and the proximal and tail domain, when taken together, comprise at least 15, 18, 20, 25, 30, 31, 35, 40, 45, 49, 50, or 53 nucleotides.

[0534] In an embodiment, the targeting domain comprises, has, or consists of, 18 nucleotides (e.g., 18 consecutive nucleotides) having complementarity with the target domain, e.g., the targeting domain is 18 nucleotides in length; and there are at least 15, 18, 20, 25, 30, 31, 35, 40, 45, 49, 50, or 53 nucleotides 3′ to the last nucleotide of the second complementarity domain.

[0535] In an embodiment, the targeting domain comprises, has, or consists of, 18 nucleotides (e.g., 18 consecutive nucleotides) having complementarity with the target domain, e.g., the targeting domain is 18 nucleotides in length; and there are at least 16, 19, 21, 26, 31, 32, 36, 41, 46, 50, 51, or 54 nucleotides 3′ to the last nucleotide of the second complementarity domain that is complementary to its corresponding nucleotide of the first complementarity domain.

[0536] In an embodiment, the targeting domain comprises, has, or consists of, 19 nucleotides (e.g., 19 consecutive nucleotides) having complementarity with the target domain, e.g., the targeting domain is 19 nucleotides in length; and the proximal and tail domain, when taken together, comprise at least 15, 18, 20, 25, 30, 31, 35, 40, 45, 49, 50, or 53 nucleotides.

[0537] In an embodiment, the targeting domain comprises, has, or consists of, 19 nucleotides (e.g., 19 consecutive nucleotides) having complementarity with the target domain, e.g., the targeting domain is 19 nucleotides in length; and there are at least 15, 18, 20, 25, 30, 31, 35, 40, 45, 49, 50, or 53 nucleotides 3′ to the last nucleotide of the second complementarity domain.

[0538] In an embodiment, the targeting domain comprises, has, or consists of, 19 nucleotides (e.g., 19 consecutive nucleotides) having complementarity with the target domain, e.g., the targeting domain is 19 nucleotides in length; and there are at least 16, 19, 21, 26, 31, 32, 36, 41, 46, 50, 51, or 54 nucleotides 3′ to the last nucleotide of the second complementarity domain that is complementary to its corresponding nucleotide of the first complementarity domain.

[0539] In an embodiment, the targeting domain comprises, has, or consists of, 20 nucleotides (e.g., 20 consecutive nucleotides) having complementarity with the target domain, e.g., the targeting domain is 20 nucleotides in length; and the proximal and tail domain, when taken together, comprise at least 15, 18, 20, 25, 30, 31, 35, 40, 45, 49, 50, or 53 nucleotides.

[0540] In an embodiment, the targeting domain comprises, has, or consists of, 20 nucleotides (e.g., 20 consecutive nucleotides) having complementarity with the target domain, e.g., the targeting domain is 20 nucleotides in length; and there are at least 15, 18, 20, 25, 30, 31, 35, 40, 45, 49, 50, or 53 nucleotides 3′ to the last nucleotide of the second complementarity domain.

[0541] In an embodiment, the targeting domain comprises, has, or consists of, 20 nucleotides (e.g., 20 consecutive nucleotides) having complementarity with the target domain, e.g., the targeting domain is 20 nucleotides in length; and there are at least 16, 19, 21, 26, 31, 32, 36, 41, 46, 50, 51, or 54 nucleotides 3′ to the last nucleotide of the second complementarity domain that is complementary to its corresponding nucleotide of the first complementarity domain.

[0542] In an embodiment, the targeting domain comprises, has, or consists of, 21 nucleotides (e.g., 21 consecutive nucleotides) having complementarity with the target domain, e.g., the targeting domain is 21 nucleotides in length; and the proximal and tail domain, when taken together, comprise at least 15, 18, 20, 25, 30, 31, 35, 40, 45, 49, 50, or 53 nucleotides.

[0543] In an embodiment, the targeting domain comprises, has, or consists of, 21 nucleotides (e.g., 21 consecutive nucleotides) having complementarity with the target domain, e.g., the targeting domain is 21 nucleotides in length; and there are at least 15, 18, 20, 25, 30, 31, 35, 40, 45, 49, 50, or 53 nucleotides 3′ to the last nucleotide of the second complementarity domain.

[0544] In an embodiment, the targeting domain comprises, has, or consists of, 21 nucleotides (e.g., 21 consecutive nucleotides) having complementarity with the target domain, e.g., the targeting domain is 21 nucleotides in length; and there are at least 16, 19, 21, 26, 31, 32, 36, 41, 46, 50, 51, or 54 nucleotides 3′ to the last nucleotide of the second complementarity domain that is complementary to its corresponding nucleotide of the first complementarity domain.

[0545] In an embodiment, the targeting domain comprises, has, or consists of, 22 nucleotides (e.g., 22 consecutive nucleotides) having complementarity with the target domain, e.g., the targeting domain is 22 nucleotides in length; and the proximal and tail domain, when taken together, comprise at least 15, 18, 20, 25, 30, 31, 35, 40, 45, 49, 50, or 53 nucleotides.

[0546] In an embodiment, the targeting domain comprises, has, or consists of, 22 nucleotides (e.g., 22 consecutive nucleotides) having complementarity with the target domain, e.g., the targeting domain is 22 nucleotides in length; and there are at least 15, 18, 20, 25, 30, 31, 35, 40, 45, 49, 50, or 53 nucleotides 3′ to the last nucleotide of the second complementarity domain.

[0547] In an embodiment, the targeting domain comprises, has, or consists of, 22 nucleotides (e.g., 22 consecutive nucleotides) having complementarity with the target domain, e.g., the targeting domain is 22 nucleotides in length; and there are at least 16, 19, 21, 26, 31, 32, 36, 41, 46, 50, 51, or 54 nucleotides 3′ to the last nucleotide of the second complementarity domain that is complementary to its corresponding nucleotide of the first complementarity domain.

[0548] In an embodiment, the targeting domain comprises, has, or consists of, 23 nucleotides (e.g., 23 consecutive nucleotides) having complementarity with the target domain, e.g., the targeting domain is 23 nucleotides in length; and the proximal and tail domain, when taken together, comprise at least 15, 18, 20, 25, 30, 31, 35, 40, 45, 49, 50, or 53 nucleotides.

[0549] In an embodiment, the targeting domain comprises, has, or consists of, 23 nucleotides (e.g., 23 consecutive nucleotides) having complementarity with the target domain, e.g., the targeting domain is 23 nucleotides in length; and there are at least 15, 18, 20, 25, 30, 31, 35, 40, 45, 49, 50, or 53 nucleotides 3′ to the last nucleotide of the second complementarity domain.

[0550] In an embodiment, the targeting domain comprises, has, or consists of, 23 nucleotides (e.g., 23 consecutive nucleotides) having complementarity with the target domain, e.g., the targeting domain is 23 nucleotides in length; and there are at least 16, 19, 21, 26, 31, 32, 36, 41, 46, 50, 51, or 54 nucleotides 3′ to the last nucleotide of the second complementarity domain that is complementary to its corresponding nucleotide of the first complementarity domain.

[0551] In an embodiment, the targeting domain comprises, has, or consists of, 24 nucleotides (e.g., 24 consecutive nucleotides) having complementarity with the target domain, e.g., the targeting domain is 24 nucleotides in length; and the proximal and tail domain, when taken together, comprise at least 15, 18, 20, 25, 30, 31, 35, 40, 45, 49, 50, or 53 nucleotides.

[0552] In an embodiment, the targeting domain comprises, has, or consists of, 24 nucleotides (e.g., 24 consecutive nucleotides) having complementarity with the target domain, e.g., the targeting domain is 24 nucleotides in length; and there are at least 15, 18, 20, 25, 30, 31, 35, 40, 45, 49, 50, or 53 nucleotides 3′ to the last nucleotide of the second complementarity domain.

[0553] In an embodiment, the targeting domain comprises, has, or consists of, 24 nucleotides (e.g., 24 consecutive nucleotides) having complementarity with the target domain, e.g., the targeting domain is 24 nucleotides in length; and there are at least 16, 19, 21, 26, 31, 32, 36, 41, 46, 50, 51, or 54 nucleotides 3′ to the last nucleotide of the second complementarity domain that is complementary to its corresponding nucleotide of the first complementarity domain.

[0554] In an embodiment, the targeting domain comprises, has, or consists of, 25 nucleotides (e.g., 25 consecutive nucleotides) having complementarity with the target domain, e.g., the targeting domain is 25 nucleotides in length; and the proximal and tail domain, when taken together, comprise at least 15, 18, 20, 25, 30, 31, 35, 40, 45, 49, 50, or 53 nucleotides.

[0555] In an embodiment, the targeting domain comprises, has, or consists of, 25 nucleotides (e.g., 25 consecutive nucleotides) having complementarity with the target domain, e.g., the targeting domain is 25 nucleotides in length; and there are at least 15, 18, 20, 25, 30, 31, 35, 40, 45, 49, 50, or 53 nucleotides 3′ to the last nucleotide of the second complementarity domain.

[0556] In an embodiment, the targeting domain comprises, has, or consists of, 25 nucleotides (e.g., 25 consecutive nucleotides) having complementarity with the target domain, e.g., the targeting domain is 25 nucleotides in length; and there are at least 16, 19, 21, 26, 31, 32, 36, 41, 46, 50, 51, or 54 nucleotides 3′ to the last nucleotide of the second complementarity domain that is complementary to its corresponding nucleotide of the first complementarity domain.

[0557] In an embodiment, the targeting domain comprises, has, or consists of, 26 nucleotides (e.g., 26 consecutive nucleotides) having complementarity with the target domain, e.g., the targeting domain is 26 nucleotides in length; and the proximal and tail domain, when taken together, comprise at least 15, 18, 20, 25, 30, 31, 35, 40, 45, 49, 50, or 53 nucleotides.

[0558] In an embodiment, the targeting domain comprises, has, or consists of, 26 nucleotides (e.g., 26 consecutive nucleotides) having complementarity with the target domain, e.g., the targeting domain is 26 nucleotides in length; and there are at least 15, 18, 20, 25, 30, 31, 35, 40, 45, 49, 50, or 53 nucleotides 3′ to the last nucleotide of the second complementarity domain.

[0559] In an embodiment, the targeting domain comprises, has, or consists of, 26 nucleotides (e.g., 26 consecutive nucleotides) having complementarity with the target domain, e.g., the targeting domain is 26 nucleotides in length; and there are at least 16, 19, 21, 26, 31, 32, 36, 41, 46, 50, 51, or 54 nucleotides 3′ to the last nucleotide of the second complementarity domain that is complementary to its corresponding nucleotide of the first complementarity domain.

[0560] In an embodiment, the unimolecular, or chimeric, gRNA molecule (comprising a targeting domain, a first complementary domain, a linking domain, a second complementary domain, a proximal domain and, optionally, a tail domain) comprises the following sequence in which the targeting domain is depicted as 20 Ns but could be any sequence and range in length from 16 to 26 nucleotides and in which the gRNA sequence is followed by 6 Us, which serve as a termination signal for the U6 promoter, but which could be either absent or fewer in number:

(SEQ ID NO: 106)
NNNNNNNNNNNNNNNNNNNNGUUUUAGAGCUAGAAAUAGCAAGUUAAAAU
AAGGCUAGUCCGUUAUCAACUUGAAAAAGUGGCACCGAGUCGGUGCUUUU
UU.

In an embodiment, the unimolecular, or chimeric, gRNA molecule is a S. pyogenes gRNA molecule.

[0561] In some embodiments, the unimolecular, or chimeric, gRNA molecule (comprising a targeting domain, a first complementary domain, a linking domain, a second complementary domain, a proximal domain and, optionally, a tail domain) comprises the following sequence in which the targeting domain is depicted as 20 Ns but could be any sequence and range in length from 16 to 26 nucleotides and in which the gRNA sequence is followed by 6 Us, which serve as a termination signal for the U6 promoter, but which could be either absent or fewer in number:

(SEQ ID NO: 107)
NNNNNNNNNNNNNNNNNNNNGUUUUAGUACUCUGGAAACAGAAUCUACUA
AAACAAGGCAAAAUGCCGUGUUUAUCUCGUCAACUUGUUGGCGAGAUUUU
UU.

In an embodiment, the unimolecular, or chimeric, gRNA molecule is a S. aureus gRNA molecule.

[0562] Exemplary Modular gRNAs

[0563] In an embodiment, a modular gRNA comprises:
[0564] a first strand comprising, preferably from 5′ to 3′;
[0565] a targeting domain, e.g., comprising 15, 16, 17, 18, 19, 20, 21, 22, 23, 24, 25, or 26 nucleotides;
[0566] a first complementarity domain; and
[0567] a second strand, comprising, preferably from 5′ to 3′:
[0568] optionally a 5′ extension domain;
[0569] a second complementarity domain;
[0570] a proximal domain; and
[0571] a tail domain,
[0572] wherein:
[0573] (a) the proximal and tail domain, when taken together, comprise at least 15, 18, 20, 25, 30, 31, 35, 40, 45, 49, 50, or 53 nucleotides;
[0574] (b) there are at least 15, 18, 20, 25, 30, 31, 35, 40, 45, 49, 50, or 53 nucleotides 3′ to the last nucleotide of the second complementarity domain; or
[0575] (c) there are at least 16, 19, 21, 26, 31, 32, 36, 41, 46, 50, 51, or 54 nucleotides 3′ to the last nucleotide of the second complementarity domain that is complementary to its corresponding nucleotide of the first complementarity domain.

[0576] In an embodiment, the sequence from (a), (b), or (c), has at least 60, 75, 80, 85, 90, 95, or 99% homology with the corresponding sequence of a naturally occurring gRNA, or with a gRNA described herein.

[0577] In an embodiment, the proximal and tail domain, when taken together, comprise at least 15, 18, 20, 25, 30, 31, 35, 40, 45, 49, 50, or 53 nucleotides.

[0578] In an embodiment, there are at least 15, 18, 20, 25, 30, 31, 35, 40, 45, 49, 50, or 53 nucleotides 3′ to the last nucleotide of the second complementarity domain.

[0579] In an embodiment, there are at least 16, 19, 21, 26, 31, 32, 36, 41, 46, 50, 51, or 54 nucleotides 3′ to the last nucleotide of the second complementarity domain that is complementary to its corresponding nucleotide of the first complementarity domain.

[0580] In an embodiment, the targeting domain comprises, has, or consists of, 16, 17, 18, 19, 20, 21, 22, 23, 24, 25 or 26 nucleotides (e.g., 16, 17, 18, 19, 20, 21, 22, 23, 24, 25 or 26 consecutive nucleotides) having complementarity with the target domain, e.g., the targeting domain is 16, 17, 18, 19, 20, 21, 22, 23, 24, 25 or 26 nucleotides in length.

[0581] In an embodiment, the targeting domain comprises, has, or consists of, 16 nucleotides (e.g., 16 consecutive nucleotides) having complementarity with the target domain, e.g., the targeting domain is 16 nucleotides in length.

[0582] In an embodiment, the targeting domain comprises, has, or consists of, 17 nucleotides (e.g., 17 consecutive nucleotides) having complementarity with the target domain, e.g., the targeting domain is 17 nucleotides in length.

[0583] In an embodiment, the targeting domain comprises, has, or consists of, 18 nucleotides (e.g., 18 consecutive nucleotides) having complementarity with the target domain, e.g., the targeting domain is 18 nucleotides in length.

[0584] In an embodiment, the targeting domain comprises, has, or consists of, 19 nucleotides (e.g., 19 consecutive nucleotides) having complementarity with the target domain, e.g., the targeting domain is 19 nucleotides in length.

[0585] In an embodiment, the targeting domain comprises, has, or consists of, 20 nucleotides (e.g., 20 consecutive nucleotides) having complementarity with the target domain, e.g., the targeting domain is 20 nucleotides in length.

[0586] In an embodiment, the targeting domain comprises, has, or consists of, 21 nucleotides (e.g., 21 consecutive nucleotides) having complementarity with the target domain, e.g., the targeting domain is 21 nucleotides in length.

[0587] In an embodiment, the targeting domain comprises, has, or consists of, 22 nucleotides (e.g., 22 consecutive nucleotides) having complementarity with the target domain, e.g., the targeting domain is 22 nucleotides in length.

[0588] In an embodiment, the targeting domain comprises, has, or consists of, 23 nucleotides (e.g., 23 consecutive nucleotides) having complementarity with the target domain, e.g., the targeting domain is 23 nucleotides in length.

[0589] In an embodiment, the targeting domain comprises, has, or consists of, 24 nucleotides (e.g., 24 consecutive nucleotides) having complementarity with the target domain, e.g., the targeting domain is 24 nucleotides in length.

[0590] In an embodiment, the targeting domain comprises, has, or consists of, 25 nucleotides (e.g., 25 consecutive nucleotides) having complementarity with the target domain, e.g., the targeting domain is 5 nucleotides in length.

[0591] In an embodiment, the targeting domain comprises, has, or consists of, 26 nucleotides (e.g., 26 consecutive nucleotides) having complementarity with the target domain, e.g., the targeting domain is 26 nucleotides in length.

[0592] In an embodiment, the targeting domain comprises, has, or consists of, 16 nucleotides (e.g., 16 consecutive nucleotides) having complementarity with the target domain, e.g., the targeting domain is 16 nucleotides in length; and the proximal and tail domain, when taken together, comprise at least 15, 18, 20, 25, 30, 31, 35, 40, 45, 49, 50, or 53 nucleotides. In an embodiment, the targeting domain comprises, has, or consists of, 16 nucleotides (e.g., 16 consecutive nucleotides) having complementarity with the target domain, e.g., the targeting domain is 16 nucleotides in length; and there are at least 15, 18, 20, 25, 30, 31, 35, 40, 45, 49, 50, or 53 nucleotides 3′ to the last nucleotide of the second complementarity domain.

[0593] In an embodiment, the targeting domain comprises, has, or consists of, 16 nucleotides (e.g., 16 consecutive nucleotides) having complementarity with the target domain, e.g., the targeting domain is 16 nucleotides in length; and there are at least 16, 19, 21, 26, 31, 32, 36, 41, 46, 50, 51, or 54 nucleotides 3′ to the last nucleotide of the second complementarity domain that is complementary to its corresponding nucleotide of the first complementarity domain.

[0594] In an embodiment, the targeting domain has, or consists of, 17 nucleotides (e.g., 17 consecutive nucleotides) having complementarity with the target domain, e.g., the targeting domain is 17 nucleotides in length; and the proximal and tail domain, when taken together, comprise at least 15, 18, 20, 25, 30, 31, 35, 40, 45, 49, 50, or 53 nucleotides.

[0595] In an embodiment, the targeting domain has, or consists of, 17 nucleotides (e.g., 17 consecutive nucleotides) having complementarity with the target domain, e.g., the targeting domain is 17 nucleotides in length; and there are at least 15, 18, 20, 25, 30, 31, 35, 40, 45, 49, 50, or 53 nucleotides 3′ to the last nucleotide of the second complementarity domain.

[0596] In an embodiment, the targeting domain has, or consists of, 17 nucleotides (e.g., 17 consecutive nucleotides) having complementarity with the target domain, e.g., the targeting domain is 17 nucleotides in length; and there are at least 16, 19, 21, 26, 31, 32, 36, 41, 46, 50, 51, or 54 nucleotides 3′ to the last nucleotide of the second complementarity domain that is complementary to its corresponding nucleotide of the first complementarity domain.

[0597] In an embodiment, the targeting domain has, or consists of, 18 nucleotides (e.g., 18 consecutive nucleotides) having complementarity with the target domain, e.g., the targeting domain is 18 nucleotides in length; and the proximal and tail domain, when taken together, comprise at least 15, 18, 20, 25, 30, 31, 35, 40, 45, 49, 50, or 53 nucleotides.

[0598] In an embodiment, the targeting domain has, or consists of, 18 nucleotides (e.g., 18 consecutive nucleotides) having complementarity with the target domain, e.g., the targeting domain is 18 nucleotides in length; and there are at least 15, 18, 20, 25, 30, 31, 35, 40, 45, 49, 50, or 53 nucleotides 3′ to the last nucleotide of the second complementarity domain.

[0599] In an embodiment, the targeting domain has, or consists of, 18 nucleotides (e.g., 18 consecutive nucleotides) having complementarity with the target domain, e.g., the targeting domain is 18 nucleotides in length; and there are at least 16, 19, 21, 26, 31, 32, 36, 41, 46, 50, 51, or 54 nucleotides 3′ to the last nucleotide of the second complementarity domain that is complementary to its corresponding nucleotide of the first complementarity domain.

[0600] In an embodiment, the targeting domain comprises, has, or consists of, 19 nucleotides (e.g., 19 consecutive nucleotides) having complementarity with the target domain, e.g., the targeting domain is 19 nucleotides in length; and the proximal and tail domain, when taken together, comprise at least 15, 18, 20, 25, 30, 31, 35, 40, 45, 49, 50, or 53 nucleotides.

[0601] In an embodiment, the targeting domain comprises, has, or consists of, 19 nucleotides (e.g., 19 consecutive nucleotides) having complementarity with the target domain, e.g., the targeting domain is 19 nucleotides in length; and there are at least 15, 18, 20, 25, 30, 31, 35, 40, 45, 49, 50, or 53 nucleotides 3′ to the last nucleotide of the second complementarity domain.

[0602] In an embodiment, the targeting domain comprises, has, or consists of, 19 nucleotides (e.g., 19 consecutive nucleotides) having complementarity with the target domain, e.g., the targeting domain is 19 nucleotides in length; and there are at least 16, 19, 21, 26, 31, 32, 36, 41, 46, 50, 51, or 54 nucleotides 3′ to the last nucleotide of the second complementarity domain that is complementary to its corresponding nucleotide of the first complementarity domain.

[0603] In an embodiment, the targeting domain comprises, has, or consists of, 20 nucleotides (e.g., 20 consecutive nucleotides) having complementarity with the target domain, e.g., the targeting domain is 20 nucleotides in length; and the proximal and tail domain, when taken together, comprise at least 15, 18, 20, 25, 30, 31, 35, 40, 45, 49, 50, or 53 nucleotides.

[0604] In an embodiment, the targeting domain comprises, has, or consists of, 20 nucleotides (e.g., 20 consecutive nucleotides) having complementarity with the target domain, e.g., the targeting domain is 20 nucleotides in length; and there are at least 15, 18, 20, 25, 30, 31, 35, 40, 45, 49, 50, or 53 nucleotides 3′ to the last nucleotide of the second complementarity domain.

[0605] In an embodiment, the targeting domain comprises, has, or consists of, 20 nucleotides (e.g., 20 consecutive nucleotides) having complementarity with the target domain, e.g., the targeting domain is 20 nucleotides in length; and there are at least 16, 19, 21, 26, 31, 32, 36, 41, 46, 50, 51, or 54 nucleotides 3′ to the last nucleotide of the second complementarity domain that is complementary to its corresponding nucleotide of the first complementarity domain.

[0606] In an embodiment, the targeting domain comprises, has, or consists of, 21 nucleotides (e.g., 21 consecutive nucleotides) having complementarity with the target domain, e.g., the targeting domain is 21 nucleotides in length; and the proximal and tail domain, when taken together, comprise at least 15, 18, 20, 25, 30, 31, 35, 40, 45, 49, 50, or 53 nucleotides.

[0607] In an embodiment, the targeting domain comprises, has, or consists of, 21 nucleotides (e.g., 21 consecutive nucleotides) having complementarity with the target domain, e.g., the targeting domain is 21 nucleotides in length; and there are at least 15, 18, 20, 25, 30, 31, 35, 40, 45, 49, 50, or 53 nucleotides 3′ to the last nucleotide of the second complementarity domain.

[0608] In an embodiment, the targeting domain comprises, has, or consists of, 21 nucleotides (e.g., 21 consecutive nucleotides) having complementarity with the target domain, e.g., the targeting domain is 21 nucleotides in length; and there are at least 16, 19, 21, 26, 31, 32, 36, 41, 46, 50, 51, or 54 nucleotides 3′ to the last nucleotide of the second complementarity domain that is complementary to its corresponding nucleotide of the first complementarity domain.

[0609] In an embodiment, the targeting domain comprises, has, or consists of, 22 nucleotides (e.g., 22 consecutive nucleotides) having complementarity with the target domain, e.g., the targeting domain is 22 nucleotides in length; and the proximal and tail domain, when taken together, comprise at least 15, 18, 20, 25, 30, 31, 35, 40, 45, 49, 50, or 53 nucleotides.

[0610] In an embodiment, the targeting domain comprises, has, or consists of, 22 nucleotides (e.g., 22 consecutive nucleotides) having complementarity with the target domain, e.g., the targeting domain is 22 nucleotides in length; and there are at least 15, 18, 20, 25, 30, 31, 35, 40, 45, 49, 50, or 53 nucleotides 3′ to the last nucleotide of the second complementarity domain.

[0611] In an embodiment, the targeting domain comprises, has, or consists of, 22 nucleotides (e.g., 22 consecutive nucleotides) having complementarity with the target domain, e.g., the targeting domain is 22 nucleotides in length; and there are at least 16, 19, 21, 26, 31, 32, 36, 41, 46, 50, 51, or 54 nucleotides 3′ to the last nucleotide of the second complementarity domain that is complementary to its corresponding nucleotide of the first complementarity domain.

[0612] In an embodiment, the targeting domain comprises, has, or consists of, 23 nucleotides (e.g., 23 consecutive nucleotides) having complementarity with the target domain, e.g., the targeting domain is 23 nucleotides in length; and the proximal and tail domain, when taken together, comprise at least 15, 18, 20, 25, 30, 31, 35, 40, 45, 49, 50, or 53 nucleotides.

[0613] In an embodiment, the targeting domain comprises, has, or consists of, 23 nucleotides (e.g., 23 consecutive nucleotides) having complementarity with the target domain, e.g., the targeting domain is 23 nucleotides in length; and there are at least 15, 18, 20, 25, 30, 31, 35, 40, 45, 49, 50, or 53 nucleotides 3′ to the last nucleotide of the second complementarity domain.

[0614] In an embodiment, the targeting domain comprises, has, or consists of, 23 nucleotides (e.g., 23 consecutive nucleotides) having complementarity with the target domain, e.g., the targeting domain is 23 nucleotides in length; and there are at least 16, 19, 21, 26, 31, 32, 36, 41, 46, 50, 51, or 54 nucleotides 3′ to the last nucleotide of the second complementarity domain that is complementary to its corresponding nucleotide of the first complementarity domain.

[0615] In an embodiment, the targeting domain comprises, has, or consists of, 24 nucleotides (e.g., 24 consecutive nucleotides) having complementarity with the target domain, e.g., the targeting domain is 24 nucleotides in length; and the proximal and tail domain, when taken together, comprise at least 15, 18, 20, 25, 30, 31, 35, 40, 45, 49, 50, or 53 nucleotides.

[0616] In an embodiment, the targeting domain comprises, has, or consists of, 24 nucleotides (e.g., 24 consecutive nucleotides) having complementarity with the target domain, e.g., the targeting domain is 24 nucleotides in length; and there are at least 15, 18, 20, 25, 30, 31, 35, 40, 45, 49, 50, or 53 nucleotides 3′ to the last nucleotide of the second complementarity domain.

[0617] In an embodiment, the targeting domain comprises, has, or consists of, 24 nucleotides (e.g., 24 consecutive nucleotides) having complementarity with the target domain, e.g., the targeting domain is 24 nucleotides in length; and there are at least 16, 19, 21, 26, 31, 32, 36, 41, 46, 50, 51, or 54 nucleotides 3′ to the last nucleotide of the second complementarity domain that is complementary to its corresponding nucleotide of the first complementarity domain.

[0618] In an embodiment, the targeting domain comprises, has, or consists of, 25 nucleotides (e.g., 25 consecutive nucleotides) having complementarity with the target domain, e.g., the targeting domain is 25 nucleotides in length; and the proximal and tail domain, when taken together, comprise at least 15, 18, 20, 25, 30, 31, 35, 40, 45, 49, 50, or 53 nucleotides.

[0619] In an embodiment, the targeting domain comprises, has, or consists of, 25 nucleotides (e.g., 25 consecutive nucleotides) having complementarity with the target domain, e.g., the targeting domain is 25 nucleotides in length; and there are at least 15, 18, 20, 25, 30, 31, 35, 40, 45, 49, 50, or 53 nucleotides 3′ to the last nucleotide of the second complementarity domain.

[0620] In an embodiment, the targeting domain comprises, has, or consists of, 25 nucleotides (e.g., 25 consecutive nucleotides) having complementarity with the target domain, e.g., the targeting domain is 25 nucleotides in length; and there are at least 16, 19, 21, 26, 31, 32, 36, 41, 46, 50, 51, or 54 nucleotides 3′ to the last nucleotide of the second complementarity domain that is complementary to its corresponding nucleotide of the first complementarity domain.

[0621] In an embodiment, the targeting domain comprises, has, or consists of, 26 nucleotides (e.g., 26 consecutive nucleotides) having complementarity with the target domain, e.g., the targeting domain is 26 nucleotides in length; and the proximal and tail domain, when taken together, comprise at least 15, 18, 20, 25, 30, 31, 35, 40, 45, 49, 50, or 53 nucleotides.

[0622] In an embodiment, the targeting domain comprises, has, or consists of, 26 nucleotides (e.g., 26 consecutive nucleotides) having complementarity with the target domain, e.g., the targeting domain is 26 nucleotides in length; and there are at least 15, 18, 20, 25, 30, 31, 35, 40, 45, 49, 50, or 53 nucleotides 3′ to the last nucleotide of the second complementarity domain.

[0623] In an embodiment, the targeting domain comprises, has, or consists of, 26 nucleotides (e.g., 26 consecutive nucleotides) having complementarity with the target domain, e.g., the targeting domain is 26 nucleotides in length; and there are at least 16, 19, 21, 26, 31, 32, 36, 41, 46, 50, 51, or 54 nucleotides 3′ to the last nucleotide of the second complementarity domain that is complementary to its corresponding nucleotide of the first complementarity domain.

[0624] In another aspect, methods and compositions discussed herein provide methods and compositions for gene editing by using a gRNA molecule which comprises a polyA tail. In one embodiment, a polyA tail of undefined length ranging from 1 to 1000 nucleotide is added enzymatically using a polymerase such as E. coli polyA polymerase (E-PAP). In one embodiment, the polyA tail of a specified length (e.g., 1, 5, 10, 20, 30, 40, 50, 60, 100, or 150 nucleotides (SEQ ID NO: 2289)) is encoded on a DNA template and transcribed with the gRNA via an RNA polymerase (e.g., T7 RNA polymerase). In one embodiment, a polyA tail of defined length (e.g., 1, 5, 10, 20, 30, 40, 50, 60, 100, or 150 nucleotides (SEQ ID NO: 2289)) is synthesized as a synthetic oligonucleotide and ligated on the 3′ end of the gRNA with either an RNA ligase or a DNA ligase with our without a splinted DNA oligonucleotide complementary to the guide RNA and the polyA oligonucleotide. In one embodiment, the entire gRNA including a defined length of polyA tail is made synthetically, in one or several pieces, and ligated together by either an RNA ligase or a DNA ligase with or without a splinted DNA oligonucleotide.

[0625] Additional exemplary gRNAs for use in the present invention are disclosed in International Application WO 2015/048577, the entire contents of which are expressly incorporated herein by reference.

[0626] In embodiments, one or more of the gRNA domains (e.g., the targeting domain, first complementarity domain, linking domain, second complementarity domain, proximal domain, or tail domain) has at least 50, 60, 70, 80, 85, 90, or 95% homology with, or differs by no more than 1, 2, 3, 4, 5, or 6 nucleotides from, a corresponding reference domain, e.g., a naturally occurring domain of a bacterial strain disclosed herein.

[0627] In an embodiment, one or more of the gRNA domains (e.g., the targeting domain, first complementarity domain, linking domain, second complementarity domain, proximal domain, or tail domain), independently, do not comprise modifications. In an embodiment, one or more of the gRNA domains (e.g., the targeting domain, first complementarity domain, linking domain, second complementarity domain, proximal domain, or tail domain), independently, comprise one or more modifications, e.g., modifications that the render the domain less susceptible to degradation or more bio-compatible, e.g., less immunogenic. By way of example, the backbone of the domain can be modified with a phosphorothioate. In an embodiment a nucleotide of the domain can comprise a 2′ modification, e.g., a 2-acetylation or a 2′ methylation.

[0628] In an embodiment, a method herein involves a second gRNA which is a modular gRNA, e.g., wherein one or more nucleic acid molecules encode a modular gRNA. In other embodiments, the method involves a second gRNA which is a chimeric gRNA. In other embodiments, when the method involves a third or fourth gRNA, the third and fourth gRNA may be a modular gRNA or a chimeric gRNA. When multiple gRNAs are used, any combination of modular or chimeric gRNAs may be used.

[0629] Landmarks

[0630] Another characteristic of a gRNA molecule is its ability to position a Cas9-mediated cleavage event or break at a desired, e.g., preselected, position on the target nucleic acid. The Cas9-cleavage event can also be characterized as occurring relative to, e.g., within a predefined distance, from a landmark. In an embodiment, one can configure a gRNA such that the gRNA positions a Cas9 molecule so that the Cas9 molecule mediates cleavage, e.g., a double strand or a single strand break, at a preselected position relative to a landmark on a target nucleic acid. In an embodiment, the landmark is the target position, e.g., the nucleotide or one of the nucleotides to be corrected or altered. In an embodiment, the landmark is a position that corresponds to a position in the template nucleic acid, e.g., the 5′ or 3′ end of the replacement sequence, within the replacement sequence, the replacement position where the replacement position is a single nucleotide, the 5′ or 3′ of the template nucleic acid, or the 5′ or 3′ homology arm. In an embodiment, the landmark is an intron/exon boundary, the 5′ or 3′ end or within a coding region, the 5′ or 3′ end or within a transcribed region, or the 5′ or 3′ end or within a repeated element. In an embodiment, the preselected position is at the landmark. In an embodiment, the preselected position is away from the landmark, e.g., within 1, 5, 10, 50, 100, 200, 300, 400, or 500 nucleotides of the landmark, or at least 1, 5, 10, 25, 50 or 100 nucleotides away from the landmark, or 1 to 500, 1 to 400, 1 to 300, 1 to 200, 1 to 100, 10 to 500, 10 to 400, 10 to 300, 10 to 200 or 10 to 100 nucleotides away from the landmark.

II. Methods for Designing gRNAs

[0631] Methods for designing gRNAs are described herein, including methods for selecting, designing and validating target domains. Exemplary targeting domains are also provided herein. Targeting Domains discussed herein can be incorporated into the gRNAs described herein.

[0632] Methods for selection and validation of target sequences as well as off-target analyses are described, e.g., in Mali et al., 2013 SCIENCE 339(6121): 823-826; Hsu et al. NAT BIOTECHNOL, 31(9): 827-32; Fu et al. (2014) NAT. BIOTECHNOL 32(3): 279-84; Heigwer et al., 2014 NAT METHODS 11(2): 122-3; Bae et al. (2014) BIOINFORMATICS 30(10): 1473-5; Xiao et al. (2014) BIOINFORMATICS 30 (8): 1180-1182. Additional considerations for designing gRNAs are discussed in the section entitled “gRNA Design” in PCT Application WO 2015/048577, the entire contents of which are expressly incorporated herein by reference.

[0633] For example, a software tool can be used to optimize the choice of gRNA within a user's target sequence, e.g., to minimize total off-target activity across the genome. Off target activity may be other than cleavage. For each possible gRNA choice using S. pyogenes Cas9, the tool can identify all off-target sequences (preceding either NAG or NGG PAMs) across the genome that contain up to certain number (e.g., 1, 2, 3, 4, 5, 6, 7, 8, 9, or 10) of mismatched base-pairs. The cleavage efficiency at each off-target sequence can be predicted, e.g., using an experimentally-derived weighting scheme. Each possible gRNA is then ranked according to its total predicted off-target cleavage; the top-ranked gRNAs represent those that are likely to have the greatest on-target and the least off-target cleavage. Other functions, e.g., automated reagent design for CRISPR construction, primer design for the on-target Surveyor assay, and primer design for high-throughput detection and quantification of off-target cleavage via next-gen sequencing, can also be included in the tool. Candidate gRNA molecules can be evaluated by art-known methods or as described in Section IV herein.

[0634] The targeting domains discussed herein can be incorporated into the gRNAs described herein.

[0635] Guide RNAs (gRNAs) for use with S. pyogenes, S. aureus and N. meningitidis Cas9 molecules are identified using a DNA sequence searching algorithm. Guide RNA design is carried out using a custom guide RNA design software based on the public tool cas-offinder (Bae et al. (2014) BIOINFORMATICS 30(10): 1473-5). Said custom guide RNA design software scores guides after calculating their genome-wide off-target propensity. Typically matches ranging from perfect matches to 7 mismatches are considered for guides ranging in length from 17 to 24. Once the off-target sites are computationally determined, an aggregate score is calculated for each guide and summarized in a tabular output using a web-interface. In addition to identifying potential gRNA sites adjacent to PAM sequences, the software also identifies all PAM adjacent sequences that differ by 1, 2, 3 or more nucleotides from the selected gRNA sites. Genomic DNA sequence for each gene was obtained from the UCSC Genome browser and sequences were screened for repeat elements using the publically available RepeatMasker program. RepeatMasker searches input DNA sequences for repeated elements and regions of low complexity. The output is a detailed annotation of the repeats present in a given query sequence.

[0636] Following identification, gRNAs are ranked into tiers based on their distance to the target site, their orthogonality and presence of a 5′ G (based on identification of close matches in the human genome containing a relevant PAM (e.g., in the case of S. pyogenes, a NGG PAM, in the case of S. aureus, a NNGRRT or NNGRRV PAM, and in the case of N. meningitidis, a NNNNGATT or NNNNGCTT PAM). Orthogonality refers to the number of sequences in the human genome that contain a minimum number of mismatches to the target sequence. A “high level of orthogonality” or “good orthogonality” may, for example, refer to 20-mer gRNAs that have no identical sequences in the human genome besides the intended target, nor any sequences that contain one or two mismatches in the target sequence. Targeting domains with good orthogonality are selected to minimize off-target DNA cleavage.

[0637] gRNAs are identified for both single-gRNA nuclease cleavage and for a dual-gRNA paired “nickase” strategy. Criteria for selecting gRNAs and the determination for which gRNAs can be used for the dual-gRNA paired “nickase” strategy is based on two considerations: gRNA pairs should be oriented on the DNA such that PAMs are facing out and cutting with the D10A Cas9 nickase will result in 5′ overhangs.

[0638] An assumption that cleaving with dual nickase pairs will result in deletion of the entire intervening sequence at a reasonable frequency. However, cleaving with dual nickase pairs can also result in indel mutations at the site of only one of the gRNAs. Candidate pair members can be tested for how efficiently they remove the entire sequence versus causing indel mutations at the site of one gRNA.

[0639] The targeting domains discussed herein can be incorporated into the gRNAs described herein.

[0640] In an embodiment, two or more (e.g., three or four) gRNA molecules are used with one Cas9 molecule. In another embodiment, when two or more (e.g., three or four) gRNAs are used with two or more Cas9 molecules, at least one Cas9 molecule is from a different species than the other Cas9 molecule(s). For example, when two gRNA molecules are used with two Cas9 molecules, one Cas9 molecule can be from one species and the other Cas9 molecule can be from a different species. Both Cas9 species are used to generate a single or double-strand break, as desired.

[0641] In some embodiments, the targeting domains described herein are used with a Cas9 nickase molecule to generate a single strand break.

[0642] In some embodiments, the targeting domains described herein are used with a Cas9 nuclease molecule to generate a double strand break.

[0643] When two gRNAs designed for use to target two Cas9 molecules, one Cas9 can be one species, the second Cas9 can be from a different species. Both Cas9 species are used to generate a single or double-strand break, as desired.

[0644] It is contemplated herein that any upstream gRNA described herein may be paired with any downstream gRNA described herein. When an upstream gRNA designed for use with one species of Cas9 is paired with a downstream gRNA designed for use from a different species of Cas9, both Cas9 species are used to generate a single or double-strand break, as desired.

[0645] In an embodiment, the targeting domain of a gRNA molecule is configured to avoid unwanted target chromosome elements, such as repeat elements, e.g., Alu elements, in the target domain. The gRNA molecule may be a first, second, third and/or fourth gRNA molecule.

Strategies to Identify HDR-Enhancing gRNAs to Alter a Gene

[0646] In some embodiments, the methods described herein comprise altering (e.g., modifying, e.g., by activating or repressing) the expression of a gene (e.g., a gene encoding a protein involved in one or more DNA repair pathways). In some embodiments, the expression of the gene is altered using a HDR-enhancing gRNA. In some embodiments, the methods described herein provide an alteration of (e.g., by repressing) the expression of a gene that does not comprise nucleotide insertion or deletion of the gene. In some embodiments, this type of alteration is also referred to as “knocking down” the expression of the gene.

[0647] In other embodiments, the altered expression of a gene, e.g., is mediated by a CRISPR/Cas system comprising a Cas9 molecule (e.g., an eaCas9 molecule or an eiCas9 molecule) and an HDR-enhancing gRNA in order to alter transcription (e.g., to block, reduce, increase transcription, or decrease transcription) of the gene. In some embodiments, where an eiCas9 molecule is used, transcription of the gene is altered temporarily or transiently. In one embodiment, the HDR-enhancing gRNA targets 53BP1, Rif1, PTIP, KU 70, KU 80, XRCC4, XLF, Artemis, BRCA2, BRCA1, CtIP, EXol, DNA2, MRN complex, MRE11, Rad50, NbsI, Rad51, XRCC1, Ligase I, Ligase III, Pol Theta, Fbh1, RTEL, PARI, Rap80, Rad52, ERCC1, XPF, XRCC1, Msh2, Msh3, Msh6, Mlh1, Pms2, or KDM4A/JMJD2A. In another embodiment, the gene may be selected from the group consisting of TP53BP1, RIF1, PAXIP1, XRCC6, XRCC5, PRKDC, LIG4, XRCC4, NHEJ1, DCLRElC, BRCA2, RAD51, XRCC1, LIG1, LIG3, POLQ, FBXO18, RTEL1, PARPBP, UIMC1, RAD52, ERCC1, ERCC4, PARP1, BRCA1, RBBP8, EX01, DNA2, MRE11A, RAD50, NBN, MSH2, MSH3, MSH6, MlH1, PMS2, EZH2, KDM4A/JMJD2A, and CKD1.

[0648] In another embodiment, the altered expression of a gene is mediated by a CRISPR/Cas system comprising a Cas9-fusion molecule (e.g., an eiCas9 fusion molecule, e.g., an eiCas9 molecule fused to a transcription repressor domain, a transcription activator domain, or a chromatin modifying domain) and an HDR-enhancing gRNA to alter transcription (e.g., to block, reduce, increase transcription, or decrease transcription) of the gene. In some embodiments, where an eiCas9 molecule is used, transcription of the gene is altered temporarily or transiently. In one embodiment, the HDR-enhancing gRNA targets 53BP1, Rif1, PTIP, KU 70, KU 80, XRCC4, XLF, Artemis, BRCA2, BRCA1, CtIP, EXol, DNA2, MRN complex, MRE11, Rad50, NbsI, Rad51, XRCC1, Ligase I, Ligase III, Pol Theta, Fbh1, RTEL, PARI, Rap80, Rad52, ERCC1, XPF, XRCC1, Msh2, Msh3, Msh6, Mlh1, Pms2, or KDM4A/JMJD2A. In one embodiment, the target gene may be selected from the group consisting of TP53BP1, RIF1, PAXIP1, XRCC6, XRCC5, PRKDC, LIG4, XRCC4, NHEJ1, DCLRElC, BRCA2, RAD51, XRCC1, LIG1, LIG3, POLQ, FBXO18, RTEL1, PARPBP, UIMC1, RAD52, ERCC1, ERCC4, PARP1, BRCA1, RBBP8, EX01, DNA2, MRE11A, RAD50, NBN, MSH2, MSH3, MSH6, MlH1, PMS2, EZH2, KDM4A/JMJD2A, and CKD1.

[0649] A transcriptional activator or a transcriptional repressor can be linked, or fused, to any of the Cas9 molecules described herein either covalently or non-covalently. The transcriptional activator or a transcriptional repressor can be linked, covalently or non-covalently, to the N terminus or the C terminus of the Cas9 molecule. The transcriptional activator or a transcriptional repressor can be linked to a residue other than the N or C terminal residue of the Cas9 molecule, e.g., to an internal residue of the Cas9 molecule. In an embodiment the linkage is other than a peptide linkage between amino acid residues of the Cas9/transcriptional activator or a transcriptional repressor, e.g., the linkage is a covalent linkage through a side chain of an amino acid of the Cas 9 molecule and/or the transcriptional activator or a transcriptional repressor. By way of example, the linkage can be a linkage to the terminal N of the side chain of a lysine, e.g., an internal lysine residue, e.g., an inernal lysine residue from any of the Cas 9 domains described herein. In an embodiment the transcriptional activator or a transcriptional repressor is linked, postranslationally, to a Cas 9 molecule. The transcriptional activator or a transcriptional repressor is linked to the Cas9 molecule such that proper folding and function of the Cas9 molecule and the transcriptional activator or a transcriptional repressor is maintained. In an embodiment the linkage is a peptide linkage, e.g., as in a fusion protein.

[0650] In an embodiment, a linker, e.g., a linker described herein, is disposed between the Cas9 molecule and the transcriptional activator or a transcriptional repressor. The linker can be disposed at the N terminus of the transcriptional activator or a transcriptional repressor. The linker can be disposed at the C terminus of the transcriptional activator or a transcriptional repressor. In an embodiment, a linker is disposed at the N terminus and the C terminus of the transcriptional activator or a transcriptional repressor. In an embodiment, a linker is disposed between an amino acid residue of the Cas 9 molecule and the transcriptional activator or a transcriptional repressor.

[0651] The linker may be a short peptide sequence. Exemplary linkers suitable for use to link a transcriptional activator or a transcriptional repressor to a Cas9 molecule are disclosed herein. In an embodiment, a linker is not used and the Cas9 molecule and the transcriptional activator or a transcriptional repressor are directly linked to each other by a covalent bond, e.g., a peptide bond. In alternative embodiments, the Cas9 molecule and the transcriptional activator or a transcriptional repressor are linked by a covalent bond that is not a peptide bond, e.g., by chemical conjugation.

[0652] In an embodiment, the Cas9/transcriptional activator or a transcriptional repressor is a fusion protein, where transcriptional activator or a transcriptional repressor is covalently linked to the Cas9 molecule by a peptide bond. The N terminus or C terminus of the transcriptional activator or a transcriptional repressor can be linked to the N terminus, e.g., the N-terminal residue, or the C terminus, e.g., the C-terminal residue of the Cas9 molecule. In another embodiment, the transcriptional activator or a transcriptional repressor is linked to a residue that is not the N terminal residue or the C terminal residue of the Cas9 molecule, e.g., the transcriptional activator or a transcriptional repressor is linked to an internal residue of the Cas9 molecule. In an embodiment, the transcriptional activator or a transcriptional repressor is inserted to the sequence of a Cas 9 molecule. In an embodiment, the N-terminal residue of the transcriptional activator or a transcriptional repressor is linked to an internal residue of the Cas9 molecule and the C-terminal residue of the transcriptional activator or a transcriptional repressor is linked to an internal residue of the Cas9 molecule.

[0653] When the transcriptional activator or a transcriptional repressor is linked to an internal residue of the Cas9 molecule as a fusion protein, the transcriptional activator or a transcriptional repressor is disposed between sequences of the Cas9 molecule, such that the primary structure of the Cas9 fusion protein is organized as follows: Cas9N-L1-transcriptional activator or transcriptional repressor-L2-Cas9C, wherein Cas9N represents an N terminal portion of the sequence of the Cas9 molecule, transcriptional activator or transcriptional repressor represents the transcriptional activator or transcriptional repressor, Cas9C represents a C terminal portion of the Cas9 molecule, L1 is an optional linker, and L2 is an optional linker. A Cas9 fusion protein can comprise L1, L2, or both L1 and L2. L1 and L2 can be the same, or different, e.g., they can differ in length, or in amino acid composition or sequence. In an embodiment the transcriptional activator or transcriptional repressor (with or without L1 and/or L2) can be disposed between two amino acid residues that are adjacent one another in the Cas 9 molecule. In an embodiment the transcriptional activator or transcriptional repressor (with or without L1 and/or L2) can be substituted for one or more amino acid residues of the Cas 9 molecule, e.g., a region of Cas 9 molecule sequence can be deleted and replaced with the transcriptional activator or transcriptional repressor (with or without L1 and/or L2). In an embodiment, a Cas9 fusion protein, comprises a plurality of, e.g., 2, or 3, transcriptional activators or transcriptional repressors (with or without L1 and/or L2).

[0654] In an embodiment, a first linker is disposed between Cas9N and the N-terminus of the transcriptional activator or transcriptional repressor and a second linker is disposed between the C-terminus of the transcriptional activator or transcriptional repressor and Cas9C. The linkers disposed between an transcriptional activator or transcriptional repressor and a Cas9, or a portion of a Cas9 molecule, may be selected for specific length and/or flexibility to allow the primary structure of the transcriptional activator or transcriptional repressor and the Cas9 molecule to properly fold such that the transcriptional activator or transcriptional repressor and the Cas9 molecule exhibit functional activity.

[0655] In an embodiment, the transcriptional activator or transcriptional repressor is disposed in a region of the Cas9 molecule that is not highly conserved and/or is dispensable for Cas9 activity. For example, the transcriptional activator or transcriptional repressor may be disposed in a REC domain, or in place of all or part of a REC domain. For example, the transcriptional activator or transcriptional repressor (with or without L1 and/or L2) disposed in a REC deletion, e.g., the REC₂ deletion, the REC1_{CT} deletion, or the REC1_{SUB} deletion, as these regions are known for being dispensable for Cas9 activity, and are spatially distant from the regions that mediate Cas9 activity. In this embodiment, when the Cas9/transcriptional activator or transcriptional repressor fusion protein is folded, the regions of the Cas9 molecule, including the regions physically separated by the transcriptional activator or transcriptional repressor sequence in the primary structure, are able to fold such that the Cas9 molecule comprises functional Cas9 activity. In addition, the transcriptional activator or transcriptional repressor is linked to the Cas9 molecule sequences such that the transcriptional activator or transcriptional repressor can also fold such that the transcriptional activator or transcriptional repressor comprises functional transcriptional activator or transcriptional repressor activity.

[0656] A fusion protein comprising a Cas9 molecule and a transcriptional activator or transcriptional repressor is generated using standard recombinant DNA techniques known in the art, such as by constructing a recombinant nucleic acid molecule that comprises a nucleic acid sequence encoding the Cas9 molecule and a nucleic acid sequence encoding the transcriptional activator or transcriptional repressor in a configuration such that expression of the recombinant nucleic acid results in production of the Cas9/transcriptional activator or transcriptional repressor fusion protein, e.g., the nucleic acid sequence(s) encoding the Cas9 molecule is in frame with the nucleic acid sequence encoding the transcriptional activator or transcriptional repressor.

[0657] In some embodiments, the knockdown of a gene is mediated by a CRISPR/Cas system comprising a Cas9-fusion molecule (e.g., an eiCas9 molecule fused to a transcription repressor domain or a chromatin modifying domain) and an HDR-enhancing gRNA to decrease transcription (e.g., to block, or reduce transcription) of the gene. In some embodiments, the knockdown of a gene is mediated by a CRISPR/Cas system comprising an eiCas9 molecule fused to a transcription repressor domain and an HDR-enhancing gRNA to decrease transcription (e.g., to block, or reduce transcription) of the gene. In some embodiments, where an eiCas9 molecule is used, transcription of the gene is altered temporarily or transiently. In some embodiments, this approach results in a reduction, decrease, repression, or elimination of the expression of the gene (e.g., by inhibiting transcription) of the gene. In some embodiments, the transcription of the target gene is reduced by at least about 10%, at least about 20%, at least about 30%, at least about 40%, at least about 50%, at least about 60%, at least about 70%, at least about 80%, at least about 90%, or greater than 90%, as compared to the level of transcription of the target gene in the absence of the HDR-enhancing gRNA that targets the gene.

[0658] In one embodiment, the transcription repressor is KRAB, Mad mSIN3 interaction domain, the ERF repressor domain, a histone lysine methyltransferase (KMT), a histone lysine demthylase (KDM), a histone lysine deacetylase, a DNA methylase, a boundary element, or a periphery recruitment element. In one embodiment, the KMT is SUV39H1, SUV39H2, G9A, Pr-SET7/8, SUV4-10H1, PR-set7, Suv4-20, Set9, EZH2, RIZ1, LSD1/BHC110, SpLsd1/Swm1/Safl10, Su(var)3-3, JMJD2A/JHDM3A, JMJD2B, JMJD2C/GASC1, JMJD2D, Rph1, JARID1A/RBP2, JARID1B/PLU-1, JARID1C/SMCX, JARID1D/SMCY, Lid, Jhn2, or Jmj2. In one embodiment, the histone lysine deacetylase is HDAC1, HDAC2, HDAC3, HDAC8, Rpd3, Hos1, Cir6, HDAC4, HDAC5, HDAC7, HDAC9, Hdal, Cir3, SIRT1, SIRT2, Sir2, Hst1, Hst2, Hst3, HSt4, or HDAC11. In one embodiment, the DNA methylase is Dam, Dcm, M. SssI, DNMT1, DNMT3a/DNMT3b, METI, DRM3, ZMET2, CMT1, or CMT2. In one embodiment, the boundary element is CTCF. In one embodiment, the periphery recruitment element is Lamin A or Lamin B.

[0659] In some embodiments, the altered expression of a gene is mediated by a CRISPR/Cas system comprising a Cas9-fusion molecule (e.g., an eiCas9 molecule fused to a transcription activator domain or a chromatin modifying domain) and an HDR-enhancing gRNA to increase transcription of the gene. In some embodiments, increased expression of a gene is mediated by a CRISPR/Cas system comprising a an eiCas9 molecule fused to a transcription activator domain and an HDR-enhancing gRNA to increase transcription of the gene. In some embodiments, where an eiCas9 molecule is used, transcription of the gene is altered temporarily or transiently. In some embodiments, this approach results in increased expression of the gene (e.g., by increasing transcription) of the gene. In some embodiments, the transcription of the target gene is increased by at least about 10%, at least about 20%, at least about 30%, at least about 40%, at least about 50%, at least about 60%, at least about 70%, at least about 80%, at least about 90%, at least about 1.1 fold, at least about 1.2 fold, at least about 1.3 fold, at least about 1.4 fold, at least about 1.5 fold, at least about 1.6 fold, at least about 1.7 fold, at least about 1.8 fold, at least about 1.9 fold, at least about 2 fold, at least about 2.5 fold, at least about 3 fold, at least about 3.5 fold, at least about 4 fold, at least about 4.5 fold, at least about 5 fold, at least about 6 fold, at least about 7 fold, at least about 8 fold, at least about 9 fold, at least about 10 fold, at least about 12 fold, at least about 15 fold, at least about 18 fold, or at least about 20-fold, as compared to the level of transcription of the target gene in the absence of the HDR-enhancing gRNA that targets the gene.

[0660] In one embodiment, the transcription activator is GAL4, VP16, VP64, a p65 subdomain (NFkB), a histone lysine methyltransferase (KMT), a histone lysine demethylate (KDM), a histone lysine acetyltransferase (KAT), a DNA demethylase, or a protein docking element. In one embodiment, the KMT is hSET1A, hSET1B, MLL1, MLL2, MLL3, MLL4, MLL5, ASH1, Trx, Trr, Ash1, SYMD2, NSD1, or DOT1. In one embodiment, the KDM is LSD1/BHC110, JHDM2a/b, UTX, or JMJD3. In one embodiment, the KAT is hGCN4, PCAF, dGCN5/PCAF, Gcn5, CBP, p300, dCBP/NEJ, TAF1, TIP60/PLIP, MOZ/MYST3, MORF/MYST4, Mst2, Sas3, CG1894, HBO1/MYST2, CHM, Mst2, HMOF/MYST1, dMOF, Sas2, Mst2, SRC1, ACTR, P160, or CLOCK. In one embodiment, the DNA demethylase is AID, TET1, DME, DML1, DML2, ROS1. In one embodiment, the protein docking element is FKBP/FRB (S. pombe) or Pil1/Abyl (E. coli).

[0661] In some embodiments, a non-coding region (e.g., an enhancer region, a promoter region a 5′ UTR, 3′ UTR, and a polyadenylation signal) of a gene is targeted to alter the expression of the gene. In some embodiments, a transcriptional regulatory region, e.g., a promoter region (e.g., a promoter region that controls the transcription of the gene) is targeted to alter (e.g., by knocking-down) the expression of the gene. In certain embodiments, one or more gRNA molecules comprise a targeting domain configured to target an eiCas9 molecule or an eiCas9 fusion protein sufficiently close to the transcriptional regulatory region, e.g., a promoter region (e.g., a promoter region that controls the transcription of the gene) to reduce, decrease or repress expression of the gene.

[0662] In some embodiments, the methods described herein provide an alteration of the expression of a gene that does not comprise nucleotide insertion or deletion of the gene. In some embodiments, this approach results in an increase in the expression of the gene. In some embodiments, the increase in expression of a gene is mediated by a CRISPR/Cas system comprising a Cas9 molecule (e.g., an eiCas9 molecule) or a Cas9-fusion molecule (e.g., an eiCas9 fusion molecule (e.g., an eiCas9 molecule fused to a transcription activator domain or a chromatin modifying domain) to alter transcription (e.g., to increase transcription) of the gene. In some embodiments, a non-coding region (e.g., an enhancer region, a promoter region a 5′ UTR, 3′ UTR, and a polyadenylation signal) of a gene is targeted to alter the expression (e.g., increase expression) of the gene. In some embodiments, a transcriptional regulatory region, e.g., a promoter region (e.g., a promoter region that controls the transcription of the gene) is targeted to alter (e.g., by increasing) the expression of the gene. In certain embodiments, one or more gRNA molecules comprise a targeting domain configured to target an eiCas9 molecule or an eiCas9 fusion protein sufficiently close to the transcriptional regulatory region, e.g., a promoter region (e.g., a promoter region that controls the transcription of the gene) to increase expression of the gene.

[0663] As an example, three strategies were utilized to identify gRNAs for use with S. pyogenes, S. aureus and N. meningitidis Cas9 molecules. In some embodiments, the identified gRNA may be used to alter (e.g., activate or repress) a gene listed in Table I.

[0664] As an example, three strategies were utilized to identify gRNAs for use with S. pyogenes, S. aureus and N. meningitidis Cas9 molecules.

TABLE I
Exemplary Genes Targets For Altered Gene
Expression Using an HDR-Enhancing gRNA

| RefSeq Target Name | Gene ID |
|---|---|
| TP53BP1 | 7158 |
| RIF1 | 55183 |
| PAXIP1 | 22976 |
| XRCC6 | 2547 |
| XRCC5 | 7520 |
| PRKDC | 5591 |
| LIG4 | 3981 |
| XRCC4 | 7518 |
| NHEJ1 | 79840 |
| DCLRE1C | 64421 |
| BRCA2 | 675 |
| RAD51 | 5888 |
| XRCC1 | 7515 |
| LIG1 | 3978 |
| LIG3 | 3980 |
| POLQ | 10721 |
| FBXO18 | 84893 |
| RTEL1 | 51750 |
| PARPBP | 55010 |
| UIMC1 | 51720 |
| RAD52 | 5893 |
| ERCC1 | 2067 |
| ERCC4 | 2072 |
| PARP1 | 142 |
| BRCA1 | 672 |
| RBBP8 | 5932 |
| EXO1 | 9156 |
| DNA2 | 1763 |
| MRE11A | 4361 |
| RAD50 | 10111 |
| NBN | 4683 |
| MSH2 | 4436 |
| MSH3 | 4437 |
| MSH6 | 2956 |
| M1H1 | 4292 |
| PMS2 | 5395 |
| EZH2 | 2146 |
| KDM4A/JMJD2A | 9682 |
| CDK1 | 983 |

[0665] As an example, HDR-enhancing gRNAs for use with S. pyogenes, and S. aureus Cas9 molecules were identified using a DNA sequence searching algorithm. HDR-enhancing guide RNA design was carried out using a custom guide RNA design software based on the public tool cas-offinder (Bae et al. (2014)). Said custom guide RNA design software scores guides after calculating their genomewide off-target propensity. Typically matches ranging from perfect matches to 7 mismatches were considered for guides ranging in length from 17 to 24. Once the off-target sites were computationally determined, an aggregate score was calculated for each guide and summarized in a tabular output using a web-interface. In addition to identifying potential gRNA sites adjacent to PAM sequences, the software also identifies all PAM adjacent sequences that differ by 1, 2, 3 or more nucleotides from the selected gRNA sites. Genomic DNA sequence for each gene was obtained from the UCSC Genome browser and sequences were screened for repeat elements using the publically available RepeatMasker program. RepeatMasker searches input DNA sequences for repeated elements and regions of low complexity. The output is a detailed annotation of the repeats present in a given query sequence.

[0666] Following identification, HDR-enhancing gRNAs were ranked into tiers based on their distance to the target site, their orthogonality and presence of a 5′ G (based on identification of close matches in the human genome containing a relavant PAM (e.g., in the case of S. pyogenes, a NGG PAM, in the case of S. aureus, a NNGRRT or NNGRRV PAM, and in the case of N. meningitidis, a NNNNGATT or NNNNGCTT PAM). Orthogonality refers to the number of sequences in the human genome that contain a minimum number of mismatches to the target sequence. A “high level of orthogonality” or “good orthogonality” may, for example, refer to 20-mer HDR-enhancing gRNAs that have no identical sequences in the human genome besides the intended target, nor any sequences that contain one or two mismatches in the target sequence. Targeting domains with good orthogonality are selected to minimize off-target DNA cleavage.

[0667] For example, for S. pyogenes and N. meningitidis targets, 17-mer, or 20-mer HDR-enhancing gRNAs were designed. As another example, for S. aureus targets, 18-mer, 19-mer, 20-mer, 21-mer, 22-mer, 23-mer and 24-mer HDR-enhancing gRNAs were designed. In some embodiments, the targeting domains, disclosed herein, may comprise the 17-mer described in Tables II.1A, II.1B, II.2A, II.2B, II.3A, II.3B, II.4A, II.4B, II.5A, II.5B, II.6A, II.6B, II.7A, II.7B, II.8A, II.8B, II.9A, II.9B, II.10A, II.10B, II.11A, II.11B, II.12A, II.12B, II.13A, II.13B, II.14A, II.14B, II.15A, II.15B, II.16A, II.16B, II.17A, II.17B, II.18A, II.18B, II.19A, II.19B, II.20A, II.20B, II.21A, II.21B, II.22A, II.22B, II.23A, II.23B, II.24A, II.24B, II.25A, II.25B, II.26A, II.26B, II.27A, II.27B, II.28A, II.28B, II.29A, II.29B, II.30A, II.30B, II.31A, II.31B, II.32A, II.32B, II.33A, II.33B, II.34A, II.34B, II.35A, II.35B, II.36A, II.36B, II.37A, II.37B, II.38A, II.38B, II.39A, II.39B, II.40A, II.40B, II.41A, II.41B, II.42A, II.42B, II.43A, II.43B, II.44A, II.44B, II.45A, II.45B, II.46A, II.46B, II.47A, II.47B, II.48A, II.48B, II.49A, II.49B, II.50A, II.50B, II.51A, II.51B, II.52A, II.52B, II.53A, II.53B, II.54A, II.54B, II.55A, II.55B, II.56A, II.56B, II.57A, II.57B, II.58A, II.58B, II.59A, II.59B, II.60A, II.60B, II.61A, II.61B, II.62A, II.62B, II.63A, II.63B, II.64A, II.64B, II.65A, II.65B, II.66, II.67A, II.67B, II.68A, II.68B, II.69A, II.69B, II.70A, II.70B, II.71A, II.71B, II.72A, II.72B, II.73A, II.73B, II.74A, II.74B, II.75A, II.75B, II.76A, II.76B, II.77A, II.77B, II.78A, or II.78B, e.g., the targeting domains of 18 or more nucleotides may comprise the 17-mer HDR-enhancing gRNAs described in Tables II.1A, II.1B, II.2A, II.2B, II.3A, II.3B, II.4A, II.4B, II.5A, II.5B, II.6A, II.6B, II.7A, II.7B, II.8A, II.8B, II.9A, II.9B, II.10A, II.10B, II.11A, II.11B, II.12A, II.12B, II.13A, II.13B, II.14A, II.14B, II.15A, II.15B, II.16A, II.16B, II.17A, II.17B, II.18A, II.18B, II.19A, II.19B, II.20A, II.20B, II.21A, II.21B, II.22A, II.22B, II.23A, II.23B, II.24A, II.24B, II.25A, II.25B, II.26A, II.26B, II.27A, II.27B, II.28A, II.28B, II.29A, II.29B, II.30A, II.30B, II.31A, II.31B, II.32A, II.32B, II.33A, II.33B, II.34A, II.34B, II.35A, II.35B, II.36A, II.36B, II.37A, II.37B, II.38A, II.38B, II.39A, II.39B, II.40A, II.40B, II.41A, II.41B, II.42A, II.42B, II.43A, II.43B, II.44A, II.44B, II.45A, II.45B, II.46A, II.46B, II.47A, II.47B, II.48A, II.48B, II.49A, II.49B, II.50A, II.50B, II.51A, II.51B, II.52A, II.52B, II.53A, II.53B, II.54A, II.54B, II.55A, II.55B, II.56A, II.56B, II.57A, II.57B, II.58A, II.58B, II.59A, II.59B, II.60A, II.60B, II.61A, II.61B, II.62A, II.62B, II.63A, II.63B, II.64A, II.64B, II.65A, II.65B, II.66, II.67A, II.67B, II.68A, II.68B, II.69A, II.69B, II.70A, II.70B, II.71A, II.71B, II.72A, II.72B, II.73A, II.73B, II.74A, II.74B, II.75A, II.75B, II.76A, II.76B, II.77A, II.77B, II.78A, or II.78B. In some embodiments, the targeting domains, disclosed herein, may comprises the 18-mer described in Tables II.1A, II.1B, II.2A, II.2B, II.3A, II.3B, II.4A, II.4B, II.5A, II.5B, II.6A, II.6B, II.7A, II.7B, II.8A, II.8B, II.9A, II.9B, II.10A, II.10B, II.11A, II.11B, II.12A, II.12B, II.13A, II.13B, II.14A, II.14B, II.15A, II.15B, II.16A, II.16B, II.17A, II.17B, II.18A, II.18B, II.19A, II.19B, II.20A, II.20B, II.21A, II.21B, II.22A, II.22B, II.23A, II.23B, II.24A, II.24B, II.25A, II.25B, II.26A, II.26B, II.27A, II.27B, II.28A, II.28B, II.29A, II.29B, II.30A, II.30B, II.31A, II.31B, II.32A, II.32B, II.33A, II.33B, II.34A, II.34B, II.35A, II.35B, II.36A, II.36B, II.37A, II.37B, II.38A, II.38B, II.39A, II.39B, II.40A, II.40B, II.41A, II.41B, II.42A, II.42B, II.43A, II.43B, II.44A, II.44B, II.45A, II.45B, II.46A, II.46B, II.47A, II.47B, II.48A, II.48B, II.49A, II.49B, II.50A, II.50B, II.51A, II.51B, II.52A, II.52B, II.53A, II.53B, II.54A, II.54B, II.55A, II.55B, II.56A, II.56B, II.57A, II.57B, II.58A, II.58B, II.59A, II.59B, II.60A, II.60B, II.61A, II.61B, II.62A, II.62B, II.63A, II.63B, II.64A, II.64B, II.65A, II.65B, II.66, II.67A, II.67B, II.68A, II.68B, II.69A, II.69B, II.70A, II.70B, II.71A, II.71B, II.72A, II.72B, II.73A, II.73B, II.74A, II.74B, II.75A, II.75B, II.76A, II.76B, II.77A, II.77B, II.78A, or II.78B, e.g., the targeting domains of 19 or more nucleotides may comprise the 18-mer HDR-enhancing gRNAs described in Tables II.1A, II.1B, II.2A, II.2B, II.3A, II.3B, II.4A, II.4B, II.5A, II.5B, II.6A, II.6B, II.7A, II.7B, II.8A, II.8B, II.9A, II.9B, II.10A, II.10B, II.11A, II.11B, II.12A, II.12B, II.13A, II.13B, II.14A, II.14B, II.15A, II.15B, II.16A, II.16B, II.17A, II.17B, II.18A, II.18B, II.19A, II.19B, II.20A, II.20B, II.21A, II.21B, II.22A, II.22B, II.23A, II.23B, II.24A, II.24B, II.25A, II.25B, II.26A, II.26B, II.27A, II.27B, II.28A, II.28B, II.29A, II.29B, II.30A, II.30B, II.31A, II.31B, II.32A, II.32B, II.33A, II.33B, II.34A, II.34B, II.35A, II.35B, II.36A, II.36B, II.37A, II.37B, II.38A, II.38B, II.39A, II.39B, II.40A, II.40B, II.41A, II.41B, II.42A, II.42B, II.43A, II.43B, II.44A, II.44B, II.45A, II.45B, II.46A, II.46B, II.47A, II.47B, II.48A, II.48B, II.49A, II.49B, II.50A, II.50B, II.51A, II.51B, II.52A, II.52B, II.53A, II.53B, II.54A, II.54B, II.55A, II.55B, II.56A, II.56B, II.57A, II.57B, II.58A, II.58B, II.59A, II.59B, II.60A, II.60B, II.61A, II.61B, II.62A, II.62B, II.63A, II.63B, II.64A, II.64B, II.65A, II.65B, II.66, II.67A, II.67B, II.68A, II.68B, II.69A, II.69B, II.70A, II.70B, II.71A, II.71B, II.72A, II.72B, II.73A, II.73B, II.74A, II.74B, II.75A, II.75B, II.76A, II.76B, II.77A, II.77B, II.78A, or II.78B. In some embodiments, the targeting domains, disclosed herein, may comprises the 19-mer described in Tables II.1A, II.1B, II.2A, II.2B, II.3A, II.3B, II.4A, II.4B, II.5A, II.5B, II.6A, II.6B, II.7A, II.7B, II.8A, II.8B, II.9A, II.9B, II.10A, II.10B, II.11A, II.11B, II.12A, II.12B, II.13A, II.13B, II.14A, II.14B, II.15A, II.15B, II.16A, II.16B, II.17A, II.17B, II.18A, II.18B, II.19A, II.19B, II.20A, II.20B, II.21A, II.21B, II.22A, II.22B, II.23A, II.23B, II.24A, II.24B, II.25A, II.25B, II.26A, II.26B, II.27A, II.27B, II.28A, II.28B, II.29A, II.29B, II.30A, II.30B, II.31A, II.31B, II.32A, II.32B, II.33A, II.33B, II.34A, II.34B, II.35A, II.35B, II.36A, II.36B, II.37A, II.37B, II.38A, II.38B, II.39A, II.39B, II.40A, II.40B, II.41A, II.41B, II.42A, II.42B, II.43A, II.43B, II.44A, II.44B, II.45A, II.45B, II.46A, II.46B, II.47A, II.47B, II.48A, II.48B, II.49A, II.49B, II.50A, II.50B, II.51A, II.51B, II.52A, II.52B, II.53A, II.53B, II.54A, II.54B, II.55A, II.55B, II.56A, II.56B, II.57A, II.57B, II.58A, II.58B, II.59A, II.59B, II.60A, II.60B, II.61A, II.61B, II.62A, II.62B, II.63A, II.63B, II.64A, II.64B, II.65A, II.65B, II.66, II.67A, II.67B, II.68A, II.68B, II.69A, II.69B, II.70A, II.70B, II.71A, II.71B, II.72A, II.72B, II.73A, II.73B, II.74A, II.74B, II.75A, II.75B, II.76A, II.76B, II.77A, II.77B, II.78A, or II.78B, e.g., the targeting domains of 20 or more nucleotides may comprise the 19-mer HDR-enhancing gRNAs described in Tables II.1A, II.1B, II.2A, II.2B, II.3A, II.3B, II.4A, II.4B, II.5A, II.5B, II.6A, II.6B, II.7A, II.7B, II.8A, II.8B, II.9A, II.9B, II.10A, II.10B, II.11A, II.11B, II.12A, II.12B, II.13A, II.13B, II.14A, II.14B, II.15A, II.15B, II.16A, II.16B, II.17A, II.17B II.18A, II.18B, II.19A, II.19B, II.20A, II.20B, II.21A, II.21B, II.22A, II.22B, II.23A, II.23B, II.24A, II.24B, II.25A, II.25B, II.26A, II.26B, II.27A, II.27B, II.28A, II.28B, II.29A, II.29B, II.30A, II.30B, II.31A, II.31B, II.32A, II.32B, II.33A, II.33B, II.34A, II.34B, II.35A, II.35B, II.36A, II.36B, II.37A, II.37B, II.38A, II.38B, II.39A, II.39B, II.40A, II.40B, II.41A, II.41B, II.42A, II.42B, II.43A, II.43B, II.44A, II.44B, II.45A, II.45B, II.46A, II.46B, II.47A, II.47B, II.48A, II.48B, II.49A, II.49B, II.50A, II.50B, II.51A, II.51B, II.52A, II.52B, II.53A, II.53B, II.54A, II.54B, II.55A, II.55B, II.56A, II.56B, II.57A, II.57B, II.58A, II.58B, II.59A, II.59B, II.60A, II.60B, II.61A, II.61B, II.62A, II.62B, II.63A, II.63B, II.64A, II.64B, II.65A, II.65B, II.66, II.67A, II.67B, II.68A, II.68B, II.69A, II.69B, II.70A, II.70B, II.71A, II.71B, II.72A, II.72B, II.73A, II.73B, II.74A, II.74B, II.75A, II.75B, II.76A, II.76B, II.77A, II.77B, II.78A, or II.78B. In some embodiments, the targeting domains, disclosed herein, may comprises the 20-mer gRNAs described in Tables II.1A, II.1B, II.2A, II.2B, II.3A, II.3B, II.4A, II.4B, II.5A, II.5B, II.6A, II.6B, II.7A, II.7B, II.8A, II.8B, II.9A, II.9B, II.10A, II.10B, II.11A, II.11B, II.12A, II.12B, II.13A, II.13B, II.14A, II.14B, II.15A, II.15B, II.16A, II.16B, II.17A, II.17B, II.18A, II.18B, II.19A, II.19B, II.20A, II.20B, II.21A, II.21B, II.22A, II.22B, II.23A, II.23B, II.24A, II.24B, II.25A, II.25B, II.26A, II.26B, II.27A, II.27B, II.28A, II.28B, II.29A, II.29B, II.30A, II.30B, II.31A, II.31B, II.32A, II.32B, II.33A, II.33B, II.34A, II.34B, II.35A, II.35B, II.36A, II.36B, II.37A, II.37B, II.38A, II.38B, II.39A, II.39B, II.40A, II.40B, II.41A, II.41B, II.42A, II.42B, II.43A, II.43B, II.44A, II.44B, II.45A, II.45B, II.46A, II.46B, II.47A, II.47B, II.48A, II.48B, II.49A, II.49B, II.50A, II.50B, II.51A, II.51B, II.52A, II.52B, II.53A, II.53B, II.54A, II.54B, II.55A, II.55B, II.56A, II.56B, II.57A, II.57B, II.58A, II.58B, II.59A, II.59B, II.60A, II.60B, II.61A, II.61B, II.62A, II.62B, II.63A, II.63B, II.64A, II.64B, II.65A, II.65B, II.66, II.67A, II.67B, II.68A, II.68B, II.69A, II.69B, II.70A, II.70B, II.71A, II.71B, II.72A, II.72B, II.73A, II.73B, II.74A, II.74B, II.75A, II.75B, II.76A, II.76B, II.77A, II.77B, II.78A, or II.78B, e.g., the targeting domains of 21 or more nucleotides may comprise the 20-mer HDR-enhancing gRNAs described in Tables II.1A, II.1B, II.2A, II.2B, II.3A, II.3B, II.4A, II.4B, II.5A, II.5B, II.6A, II.6B, II.7A, II.7B, II.8A, II.8B, II.9A, II.9B, II.10A, II.10B, II.11A, II.11B, II.12A, II.12B, II.13A, II.13B, II.14A, II.14B, II.15A, II.15B, II.16A, II.16B, II.17A, II.17B, II.18A, II.18B, II.19A, II.19B, II.20A, II.20B, II.21A, II.21B, II.22A, II.22B, II.23A, II.23B, II.24A, II.24B, II.25A, II.25B, II.26A, II.26B, II.27A, II.27B, II.28A, II.28B, II.29A, II.29B, II.30A, II.30B, II.31A, II.31B, II.32A, II.32B, II.33A, II.33B, II.34A, II.34B, II.35A, II.35B, II.36A, II.36B, II.37A, II.37B, II.38A, II.38B, II.39A, II.39B, II.40A, II.40B, II.41A, II.41B, II.42A, II.42B, II.43A, II.43B, II.44A, II.44B, II.45A, II.45B, II.46A, II.46B, II.47A, II.47B, II.48A, II.48B, II.49A, II.49B, II.50A, II.50B, II.51A, II.51B, II.52A, II.52B, II.53A, II.53B, II.54A, II.54B, II.55A, II.55B, II.56A, II.56B, II.57A, II.57B, II.58A, II.58B, II.59A, II.59B, II.60A, II.60B, II.61A, II.61B, II.62A, II.62B, II.63A, II.63B, II.64A, II.64B, II.65A, II.65B, II.66, II.67A, II.67B, II.68A, II.68B, II.69A, II.69B, II.70A, II.70B, II.71A, II.71B, II.72A, II.72B, II.73A, II.73B, II.74A, II.74B, II.75A, II.75B, II.76A, II.76B, II.77A, II.77B, II.78A, or II.78B. In some embodiments, the targeting domains, disclosed herein, may comprises the 21-mer described in Tables II.1A, II.1B, II.2A, II.2B, II.3A, II.3B, II.4A, II.4B, II.5A, II.5B, II.6A, II.6B, II.7A, II.7B, II.8A, II.8B, II.9A, II.9B, II.10A, II.10B, II.11A, II.11B, II.12A, II.12B, II.13A, II.13B, II.14A, II.14B, II.15A, II.15B, II.16A, II.16B, II.17A, II.17B, II.18A, II.18B, II.19A, II.19B, II.20A, II.20B, II.21A, II.21B, II.22A, II.22B, II.23A, II.23B, II.24A, II.24B, II.25A, II.25B, II.26A, II.26B, II.27A, II.27B, II.28A, II.28B, II.29A, II.29B, II.30A, II.30B, II.31A, II.31B, II.32A, II.32B, II.33A, II.33B, II.34A, II.34B, II.35A, II.35B, II.36A, II.36B, II.37A, II.37B, II.38A, II.38B, II.39A, II.39B, II.40A, II.40B, II.41A, II.41B, II.42A, II.42B, II.43A, II.43B, II.44A, II.44B, II.45A, II.45B, II.46A, II.46B, II.47A, II.47B, II.48A, II.48B, II.49A, II.49B, II.50A, II.50B, II.51A, II.51B, II.52A, II.52B, II.53A, II.53B, II.54A, II.54B, II.55A, II.55B, II.56A, II.56B, II.57A, II.57B, II.58A, II.58B, II.59A, II.59B, II.60A, II.60B, II.61A, II.61B, II.62A, II.62B, II.63A, II.63B, II.64A, II.64B, II.65A, II.65B, II.66, II.67A, II.67B, II.68A, II.68B, II.69A, II.69B, II.70A, II.70B, II.71A, II.71B, II.72A, II.72B, II.73A, II.73B, II.74A, II.74B, II.75A, II.75B, II.76A, II.76B, II.77A, II.77B, II.78A, or II.78B, e.g., the targeting domains of 22 or more nucleotides may comprise the 21-mer HDR-enhancing gRNAs described in Tables II.1A, II.1B, II.2A, II.2B, II.3A, II.3B, II.4A, II.4B, II.5A, II.5B, II.6A, II.6B, II.7A, II.7B, II.8A, II.8B, II.9A, II.9B, II.10A, II.10B, II.11A, II.11B, II.12A, II.12B, II.13A, II.13B, II.14A, II.14B, II.15A, II.15B, II.16A, II.16B, II.17A, II.17B, II.18A, II.18B, II.19A, II.19B, II.20A, II.20B, II.21A, II.21B, II.22A, II.22B, II.23A, II.23B, II.24A, II.24B, II.25A, II.25B, II.26A, II.26B, II.27A, II.27B, II.28A, II.28B, II.29A, II.29B, II.30A, II.30B, II.31A, II.31B, II.32A, II.32B, II.33A, II.33B, II.34A, II.34B, II.35A, II.35B, II.36A, II.36B, II.37A, II.37B, II.38A, II.38B, II.39A, II.39B, II.40A, II.40B, II.41A, II.41B, II.42A, II.42B, II.43A, II.43B, II.44A, II.44B, II.45A, II.45B, II.46A, II.46B, II.47A, II.47B, II.48A, II.48B, II.49A, II.49B, II.50A, II.50B, II.51A, II.51B, II.52A, II.52B, II.53A, II.53B, II.54A, II.54B, II.55A, II.55B, II.56A, II.56B, II.57A, II.57B, II.58A, II.58B, II.59A, II.59B, II.60A, II.60B, II.61A, II.61B, II.62A, II.62B, II.63A, II.63B, II.64A, II.64B, II.65A, II.65B, II.66, II.67A, II.67B, II.68A, II.68B, II.69A, II.69B, II.70A, II.70B, II.71A, II.71B, II.72A, II.72B, II.73A, II.73B, II.74A, II.74B, II.75A, II.75B, II.76A, II.76B, II.77A, II.77B, II.78A, or II.78B. In some embodiments, the targeting domains, disclosed herein, may comprises the 22-mer described in Tables II.1A, II.1B, II.2A, II.2B, II.3A, II.3B, II.4A, II.4B, II.5A, II.5B, II.6A, II.6B, II.7A, II.7B, II.8A, II.8B, II.9A, II.9B, II.10A, II.10B, II.11A, II.11B, II.12A, II.12B, II.13A, II.13B, II.14A, II.14B, II.15A, II.15B, II.16A, II.16B, II.17A, II.17B, II.18A, II.18B, II.19A, II.19B, II.20A, II.20B, II.21A, II.21B, II.22A, II.22B, II.23A, II.23B, II.24A, II.24B, II.25A, II.25B, II.26A, II.26B, II.27A, II.27B, II.28A, II.28B, II.29A, II.29B, II.30A, II.30B, II.31A, II.31B, II.32A, II.32B, II.33A, II.33B, II.34A, II.34B, II.35A, II.35B, II.36A, II.36B, II.37A, II.37B, II.38A, II.38B, II.39A, II.39B, II.40A, II.40B, II.41A, II.41B, II.42A, II.42B, II.43A, II.43B, II.44A, II.44B, II.45A, II.45B, II.46A, II.46B, II.47A, II.47B, II.48A, II.48B, II.49A, II.49B, II.50A, II.50B, II.51A, II.51B, II.52A, II.52B, II.53A, II.53B, II.54A, II.54B, II.55A, II.55B, II.56A, II.56B, II.57A, II.57B, II.58A, II.58B, II.59A, II.59B, II.60A, II.60B, II.61A, II.61B, II.62A, II.62B, II.63A, II.63B, II.64A, II.64B, II.65A, II.65B, II.66, II.67A, II.67B, II.68A, II.68B, II.69A, II.69B, II.70A, II.70B, II.71A, II.71B, II.72A, II.72B, II.73A, II.73B, II.74A, II.74B, II.75A, II.75B, II.76A, II.76B, II.77A, II.77B, II.78A, or II.78B, e.g., the targeting domains of 23 or more nucleotides may comprise the 22-mer HDR-enhancing gRNAs described in Tables II.1A, II.1B, II.2A, II.2B, II.3A, II.3B, II.4A, II.4B, II.5A, II.5B, II.6A, II.6B, II.7A, II.7B, II.8A, II.8B, II.9A, II.9B, II.10A, II.10B, II.11A, II.11B, II.12A, II.12B, II.13A, II.13B, II.14A, II.14B, II.15A, II.15B, II.16A, II.16B, II.17A, II.17B, II.18A, II.18B, II.19A, II.19B, II.20A, II.20B, II.21A, II.21B, II.22A, II.22B, II.23A, II.23B, II.24A, II.24B, II.25A, II.25B, II.26A, II.26B, II.27A, II.27B, II.28A, II.28B, II.29A, II.29B, II.30A, II.30B, II.31A, II.31B, II.32A, II.32B, II.33A, II.33B, II.34A, II.34B, II.35A, II.35B, II.36A, II.36B, II.37A, II.37B, II.38A, II.38B, II.39A, II.39B, II.40A, II.40B, II.41A, II.41B, II.42A, II.42B, II.43A, II.43B, II.44A, II.44B, II.45A, II.45B, II.46A, II.46B, II.47A, II.47B, II.48A, II.48B, II.49A, II.49B, II.50A, II.50B, II.51A, II.51B, II.52A, II.52B, II.53A, II.53B, II.54A, II.54B, II.55A, II.55B, II.56A, II.56B, II.57A, II.57B, II.58A, II.58B, II.59A, II.59B, II.60A, II.60B, II.61A, II.61B, II.62A, II.62B, II.63A, II.63B, II.64A, II.64B, II.65A, II.65B, II.66, II.67A, II.67B, II.68A, II.68B, II.69A, II.69B, II.70A, II.70B, II.71A, II.71B, II.72A, II.72B, II.73A, II.73B, II.74A, II.74B, II.75A, II.75B, II.76A, II.76B, II.77A, II.77B, II.78A, or II.78B. In some embodiments, the targeting domains, disclosed herein, may comprises the 23-mer described in Tables II.1A, II.1B, II.2A, II.2B, II.3A, II.3B, II.4A, II.4B, II.5A, II.5B, II.6A, II.6B, II.7A, II.7B, II.8A, II.8B, II.9A, II.9B, II.10A, II.10B, II.11A, II.11B, II.12A, II.12B, II.13A, II.13B, II.14A, II.14B, II.15A, II.15B, II.16A, II.16B, II.17A, II.17B, II.18A, II.18B, II.19A, II.19B, II.20A, II.20B, II.21A, II.21B, II.22A, II.22B, II.23A, II.23B, II.24A, II.24B, II.25A, II.25B, II.26A, II.26B, II.27A, II.27B, II.28A, II.28B, II.29A, II.29B, II.30A, II.30B, II.31A, II.31B, II.32A, II.32B, II.33A, II.33B, II.34A, II.34B, II.35A, II.35B, II.36A, II.36B, II.37A, II.37B, II.38A, II.38B, II.39A, II.39B, II.40A, II.40B, II.41A, II.41B, II.42A, II.42B, II.43A, II.43B, II.44A, II.44B, II.45A, II.45B, II.46A, II.46B, II.47A, II.47B, II.48A, II.48B, II.49A, II.49B, II.50A, II.50B, II.51A, II.51B, II.52A, II.52B, II.53A, II.53B, II.54A, II.54B, II.55A, II.55B, II.56A, II.56B, II.57A, II.57B, II.58A, II.58B, II.59A, II.59B, II.60A, II.60B, II.61A, II.61B, II.62A, II.62B, II.63A, II.63B, II.64A, II.64B, II.65A, II.65B, II.66, II.67A, II.67B, II.68A, II.68B, II.69A, II.69B, II.70A, II.70B, II.71A, II.71B, II.72A, II.72B, II.73A, II.73B, II.74A, II.74B, II.75A, II.75B, II.76A, II.76B, II.77A, II.77B, II.78A, or II.78B, e.g., the targeting domains of 24 or more nucleotides may comprise the 23-mer HDR-enhancing gRNAs described in Tables II.1A, II.1B, II.2A, II.2B, II.3A, II.3B, II.4A, II.4B, II.5A, II.5B, II.6A, II.6B, II.7A, II.7B, II.8A, II.8B, II.9A, II.9B, II.10A, II.10B, II.11A, II.11B, II.12A, II.12B, II.13A, II.13B, II.14A, II.14B, II.15A, II.15B, II.16A, II.16B, II.17A, II.17B, II.18A, II.18B, II.19A, II.19B, II.20A, II.20B, II.21A, II.21B, II.22A, II.22B, II.23A, II.23B, II.24A, II.24B, II.25A, II.25B, II.26A, II.26B, II.27A, II.27B, II.28A, II.28B, II.29A, II.29B, II.30A, II.30B, II.31A, II.31B, II.32A, II.32B, II.33A, II.33B, II.34A, II.34B, II.35A, II.35B, II.36A, II.36B, II.37A, II.37B, II.38A, II.38B, II.39A, II.39B, II.40A, II.40B, II.41A, II.41B, II.42A, II.42B, II.43A, II.43B, II.44A, II.44B, II.45A, II.45B, II.46A, II.46B, II.47A, II.47B, II.48A, II.48B, II.49A, II.49B, II.50A, II.50B, II.51A, II.51B, II.52A, II.52B, II.53A, II.53B, II.54A, II.54B, II.55A, II.55B, II.56A, II.56B, II.57A, II.57B, II.58A, II.58B, II.59A, II.59B, II.60A, II.60B, II.61A, II.61B, II.62A, II.62B, II.63A, II.63B, II.64A, II.64B, II.65A, II.65B, II.66, II.67A, II.67B, II.68A, II.68B, II.69A, II.69B, II.70A, II.70B, II.71A, II.71B, II.72A, II.72B, II.73A, II.73B, II.74A, II.74B, II.75A, II.75B, II.76A, II.76B, II.77A, II.77B, II.78A, or II.78B. In some embodiments, the targeting domains, disclosed herein, may comprises the 24-mer described in Tables II.1A, II.1B, II.2A, II.2B, II.3A, II.3B, II.4A, II.4B, II.5A, II.5B, II.6A, II.6B, II.7A, II.7B, II.8A, II.8B, II.9A, II.9B, II.10A, II.10B, II.11A, II.11B, II.12A, II.12B, II.13A, II.13B, II.14A, II.14B, II.15A, II.15B, II.16A, II.16B, II.17A, II.17B II.18A, II.18B, II.19A, II.19B, II.20A, II.20B, II.21A, II.21B, II.22A, II.22B, II.23A, II.23B, II.24A, II.24B, II.25A, II.25B, II.26A, II.26B, II.27A, II.27B, II.28A, II.28B, II.29A, II.29B, II.30A, II.30B, II.31A, II.31B, II.32A, II.32B, II.33A, II.33B, II.34A, II.34B, II.35A, II.35B, II.36A, II.36B, II.37A, II.37B, II.38A, II.38B, II.39A, II.39B, II.40A, II.40B, II.41A, II.41B, II.42A, II.42B, II.43A, II.43B, II.44A, II.44B, II.45A, II.45B, II.46A, II.46B, II.47A, II.47B, II.48A, II.48B, II.49A, II.49B, II.50A, II.50B, II.51A, II.51B, II.52A, II.52B, II.53A, II.53B, II.54A, II.54B, II.55A, II.55B, II.56A, II.56B, II.57A, II.57B, II.58A, II.58B, II.59A, II.59B, II.60A, II.60B, II.61A, II.61B, II.62A, II.62B, II.63A, II.63B, II.64A, II.64B, II.65A, II.65B, II.66, II.67A, II.67B, II.68A, II.68B, II.69A, II.69B, II.70A, II.70B, II.71A, II.71B, II.72A, II.72B, II.73A, II.73B, II.74A, II.74B, II.75A, II.75B, II.76A, II.76B, II.77A, II.77B, II.78A, or II.78B, e.g., the targeting domains of 25 or more nucleotides may comprise the 24-mer HDR-enhancing gRNAs described in Tables II.1A, II.1B, II.2A, II.2B, II.3A, II.3B, II.4A, II.4B, II.5A, II.5B, II.6A, II.6B, II.7A, II.7B, II.8A, II.8B, II.9A, II.9B, II.10A, II.10B, II.11A, II.11B, II.12A, II.12B, II.13A, II.13B, II.14A, II.14B, II.15A, II.15B, II.16A, II.16B, II.17A, II.17B, II.18A, II.18B, II.19A, II.19B, II.20A, II.20B, II.21A, II.21B, II.22A, II.22B, II.23A, II.23B, II.24A, II.24B, II.25A, II.25B, II.26A, II.26B, II.27A, II.27B, II.28A, II.28B, II.29A, II.29B, II.30A, II.30B, II.31A, II.31B, II.32A, II.32B, II.33A, II.33B, II.34A, II.34B, II.35A, II.35B, II.36A, II.36B, II.37A, II.37B, II.38A, II.38B, II.39A, II.39B, II.40A, II.40B, II.41A, II.41B, II.42A, II.42B, II.43A, II.43B, II.44A, II.44B, II.45A, II.45B, II.46A, II.46B, II.47A, II.47B, II.48A, II.48B, II.49A, II.49B, II.50A, II.50B, II.51A, II.51B, II.52A, II.52B, II.53A, II.53B, II.54A, II.54B, II.55A, II.55B, II.56A, II.56B, II.57A, II.57B, II.58A, II.58B, II.59A, II.59B, II.60A, II.60B, II.61A, II.61B, II.62A, II.62B, II.63A, II.63B, II.64A, II.64B, II.65A, II.65B, II.66, II.67A, II.67B, II.68A, II.68B, II.69A, II.69B, II.70A, II.70B, II.71A, II.71B, II.72A, II.72B, II.73A, II.73B, II.74A, II.74B, II.75A, II.75B, II.76A, II.76B, II.77A, II.77B, II.78A, or II.78B.

[0668] The targeting domains discussed herein can be incorporated into any of the HDR-enhancing gRNAs described herein.

[0669] HDR-enhancing gRNAs were identified and ranked into 4 tiers for S. pyogenes (Tables II.1A, II.1B, II.3A, II.3B, II.5A, II.5B, II.7A, II.7B, II.9A, II.9B, II.11A, II.11B, II.13A, II.13B, II.15A, II.15B, II.17A, II.17B, II.19A, II.19B, II.21A, II.21B, II.23A, II.23B, II.25A, II.25B, II.27A, II.27B, II.29A, II.29B, II.31A, II.31B, II.33A, II.33B, II.35A, II.35B, II.37A, II.37B, II.39A, II.39B, II.41A, II.41B, II.43A, II.43B, II.45A, II.45B, II.47A, II.47B, II.49A, II.49B, II.51A, II.51B, II.53A, II.53B, II.55A, II.55B, II.57A, II.57B, II.59A, II.59B, II.61A, II.61B, II.63A, II.63B, II.65A, II.65B, II.67A, II.67B, II.69A, II.69B, II.71A, II.71B, II.73A, II.73B, II.75A, II.75B, II.77A, II.77B) and 5 tiers for S. aureus (Tables II.2A, II.2B, II.4A, II.4B, II.6A, II.6B, II.8A, II.8B, II.10A, II.10B, II.12A, II.12B, II.14A, II.14B, II.16A, II.16B, II.18A, II.18B, II.20A, II.20B, II.22A, II.22B, II.24A, II.24B, II.26A, II.26B, II.28A, II.28B, II.30A, II.30B, II.32A, II.32B, II.34A, II.34B, II.36A, II.36B, II.38A, II.38B, II.40A, II.40B, II.42A, II.42B, II.44A, II.44B, II.46A, II.46B, II.48A, II.48B, II.50A, II.50B, II.52A, II.52B, II.54A, II.54B, II.56A, II.56B, II.58A, II.58B, II.60A, II.60B, II.62A, II.62B, II.64A, II.64B, II.66, II.68A, II.68B, II.70A, II.70B, II.72A, II.72B, II.74A, II.74B, II.76A, II.76B, II.78A, or II.78B).

[0670] For S. pyogenes, the targeting domains for tier 1 HDR-enhancing gRNA molecules were selected based on (1) distance to a target site (e.g., within 500 bp spanning a transcription start site (TSS), e.g., upstream or downstream of a TSS, (2) a high level of orthogonality and (3) the presence of 5′G. The targeting domain for tier 2 HDR-enhancing gRNA molecules were selected based on (1) distance to a target site (e.g., within 500 bp spanning a transcription start site (TSS), e.g., upstream or downstream of a TSS and (2) a high level of orthogonality. The targeting domain for tier 3 HDR-enhancing gRNA molecules were selected based on (1) distance to a target site (e.g., within 500 bp spanning a transcription start site (TSS), e.g., upstream or downstream of a TSS and (2) the presence of 5′G. The targeting domain for tier 4 HDR-enhancing gRNA molecules were selected based on distance to a target site (e.g., within 500 bp spanning a transcription start site (TSS), e.g., upstream or downstream of a TSS.

[0671] For S. aureus, the targeting domain for tier 1 HDR-enhancing gRNA molecules were selected based on (1) distance to a target site (e.g., within 500 bp spanning a transcription start site (TSS), e.g., upstream or downstream of a TSS, (2) a high level of orthogonality, (3) the presence of 5′G and (4) PAM is NNGRRT. The targeting domain for tier HDR-enhancing 2 gRNA molecules were selected based on (1) distance to a target site (e.g., within 500 bp spanning a transcription start site (TSS), e.g., upstream or downstream of a TSS, (2) a high level of orthogonality, and (3) PAM is NNGRRT. The targeting domain for tier 3 HDR-enhancing gRNA molecules were selected based on (1) distance to a target site (e.g., within 500 bp spanning a transcription start site (TSS), e.g., upstream or downstream of a TSS and (2) PAM is NNGRRT. The targeting domain for tier 4 HDR-enhancing gRNA molecules were selected based on (1) distance to a target site (e.g., within 500 bp spanning a transcription start site (TSS), e.g., upstream or downstream of a TSS and (2) PAM is NNGRRT. The targeting domain for tier 5 HDR-enhancing gRNA molecules were selected based on (1) distance to a target site (e.g., within 500 bp spanning a transcription start site (TSS), e.g., upstream or downstream of a TSS and (2) PAM is NNGRRV.

[0672] Note that tiers are non-inclusive (each HDR-enhancing gRNA is listed only once for the strategy). In some instances, no HDR-enhancing gRNA was identified based on the criteria of the particular tier.

[0673] Exemplary HDR-enhancing gRNAs targeting the genes listed in Table I are listed in Tables II.2A-II.78B.

[0674] Table II.1A provides exemplary targeting domains of gRNAs to be used with an eiCas9 fusion molecule (e.g., an eiCas9 fused to a transcription activator or repressor domain) to alter (e.g., activate or repress) a gene, e.g., TP53BP1 gene. The targeting domains of gRNAs were selected according to the first tier parameters. The targeting domains bind within 500 bp spanning a transcription start site (TSS), e.g., upstream or downstream of a TSS, have a high level of orthogonality and start with a 5′G. It is contemplated herein that in an embodiment the targeting domain hybridizes to the target domain through complementary base pairing. Any of the targeting domains in the table can be used with a S. pyogenes eiCas9 fusion molecule (e.g., an eiCas9 fused to a transcription activator or repressor domain) to alter (e.g., activate or repress) the TP53BP1 gene. One or more gRNA may be used to target an eiCas9 fusion molecule to a region spanning 500 bp of a transcription start site (TSS) of the TP53BP1 gene.

TABLE II.1A
Exemplary HDR-enhancing gRNAs
Targeting a TP53B1 Gene

| | A high level of orthogonality, | | | |
|---|---|---|---|---|
| | and starts with a G | | | |
| S. pyogenes | 1A | | | |
| 1st Tier | | | Target | |
| gRNA | DNA | | Site | Seq |
| Name | Strand | Targeting Domain | Length | ID |
| TP53BP1-1 | + | GACCUAGGGAUCGAUCUGGA | 20 | 387 |
| TP53BP1-2 | + | GACCUCUAGCUCGAGCGCGA | 20 | 388 |
| TP53BP1-3 | + | GACGGGAAAGGGGGAGUUCG | 20 | 389 |
| TP53BP1-4 | + | GAGCGCGAGGGACCUCCCGC | 20 | 390 |
| TP53BP1-5 | + | GAGUUCGCGGCCGGUGGCGG | 20 | 391 |
| TP53BP1-6 | + | GAUCGAUCUGGAGGGACUUG | 20 | 392 |
| TP53BP1-7 | − | GCUGUCGCCACCGCCGCCAC | 20 | 393 |
| TP53BP1-8 | + | GGAAAGGGGGAGUUCGCGGC | 20 | 394 |
| TP53BP1-9 | + | GGACCUCCCGCCGGGAUGCC | 20 | 395 |
| TP53BP1-10 | + | GGAUCGAUCUGGAGGGACUU | 20 | 396 |
| TP53BP1-11 | + | GGGAUCGAUCUGGAGGGACU | 20 | 397 |
| TP53BP1-12 | + | GGGAUUUCUUGAGUGGCGGG | 20 | 398 |
| TP53BP1-13 | + | GGGGAGUUCGCGGCCGGUGG | 20 | 399 |
| TP53BP1-14 | + | GGUACUGUUUGGAGAGAAAU | 20 | 400 |
| TP53BP1-15 | + | GGUGGCGACAGCGGCGACCU | 20 | 401 |
| TP53BP1-16 | − | GUACCAGGCAUCCCGGCGGG | 20 | 402 |
| TP53BP1-17 | − | GUCCCUCCAGAUCGAUCCCU | 20 | 403 |
| TP53BP1-18 | − | GUCCCUCGCGCUCGAGCUAG | 20 | 404 |
| TP53BP1-19 | + | GUGGCGACAGCGGCGACCUA | 20 | 405 |
| TP53BP1-20 | + | GUGUGACGUGACGGGAAAGG | 20 | 406 |

[0675] Table II.11 provides exemplary targeting domains of gRNAs to be used with an eiCas9 fusion molecule (e.g., an eiCas9 fused to a transcription activator or repressor domain) to alter (e.g., activate or repress) a gene, e.g., TP53BP1 gene. The targeting domains of gRNAs were selected according to the second tier parameters. The targeting domains bind within 500 bp spanning a transcription start site (TSS), e.g., upstream or downstream of a TSS and have a high level of orthogonality. It is contemplated herein that in an embodiment the targeting domain hybridizes to the target domain through complementary base pairing. Any of the targeting domains in the table can be used with a S. pyogenes eiCas9 fusion molecule (e.g., an eiCas9 fused to a transcription activator or repressor domain) to alter (e.g., activate or repress) the TP53BP1 gene. One or more gRNA may be used to target an eiCas9 fusion molecule to a region spanning 500 bp of a transcription start site (TSS) of the TP53BP1 gene.

TABLE II.1B
Exemplary HDR-enhancing gRNAs
Targeting a TP53B1 Gene

| | A high level of orthogonality | | | |
|---|---|---|---|---|
| | 1B | | | |
| S. pyogenes | | | Target | |
| 2nd Tier | DNA | | Site | Seq |
| gRNA Name | Strand | Targeting Domain | Length | ID |
| TP53BP1-21 | − | AACAGUACCAGGCAUCCCGG | 20 | 407 |
| TP53BP1-22 | + | AAGGGGGAGUUCGCGGCCGG | 20 | 408 |
| TP53BP1-23 | − | ACAGUACCAGGCAUCCCGGC | 20 | 409 |
| TP53BP1-24 | + | AGACCUCUAGCUCGAGCGCG | 20 | 410 |
| TP53BP1-25 | + | AGCGCGAGGGACCUCCCGCC | 20 | 411 |
| TP53BP1-26 | + | AUUGUGUGACGUGACGGGAA | 20 | 412 |
| TP53BP1-27 | + | AUUUCUUGAGUGGCGGGCGG | 20 | 413 |
| TP53BP1-28 | − | CAAGAAAUCCCGUGGAUGAU | 20 | 414 |
| TP53BP1-29 | + | CAUCCACGGGAUUUCUUGAG | 20 | 415 |
| TP53BP1-30 | − | CCCGUCACGUCACACAAUAU | 20 | 416 |
| TP53BP1-31 | + | CCGAUAUUGUGUGACGUGAC | 20 | 417 |
| TP53BP1-32 | + | CCGCAGCUACCUAUCAUCCA | 20 | 418 |
| TP53BP1-33 | − | CCGCCACUCAAGAAAUCCCG | 20 | 419 |
| TP53BP1-34 | + | CCGGGAUGCCUGGUACUGUU | 20 | 420 |
| TP53BP1-35 | − | CCGUGGAUGAUAGGUAGCUG | 20 | 421 |
| TP53BP1-36 | + | CGACCUAGGGAUCGAUCUGG | 20 | 422 |
| TP53BP1-37 | + | CGCAGCUACCUAUCAUCCAC | 20 | 423 |
| TP53BP1-38 | + | CGGCGACCUAGGGAUCGAUC | 20 | 424 |
| TP53BP1-39 | + | UCCGAUAUUGUGUGACGUGA | 20 | 425 |
| TP53BP1-40 | + | UGGCGGGCGGCGGCAGCGAA | 20 | 426 |

[0676] Table II.2A provides exemplary targeting domains of gRNAs to be used with an eiCas9 fusion molecule (e.g., an eiCas9 fused to a transcription activator or repressor domain) to alter (e.g., activate or repress) a gene, e.g., TP53BP1 gene. The targeting domains of gRNAs were selected according to the first tier parameters. The targeting domains bind within 500 bp spanning a transcription start site (TSS), e.g., upstream or downstream of a TSS, have a high level of orthogonality, start with a 5′G and PAM is NNGRRT. It is contemplated herein that in an embodiment the targeting domain hybridizes to the target domain through complementary base pairing. Any of the targeting domains in the table can be used with a S. aureus eiCas9 fusion molecule (e.g., an eiCas9 fused to a transcription activator or repressor domain) to alter (e.g., activate or repress) the TP53BP1 gene. One or more gRNA may be used to target an eiCas9 fusion molecule to a region spanning 500 bp of a transcription start site (TSS) of the TP53BP1 gene.

TABLE II.2A
Exemplary HDR-enhancing gRNAs
Targeting a TP53B1 Gene

| | A high level of orthogonality, | | | |
|---|---|---|---|---|
| | starts with a G, PAM is NNGRRT | | | |
| | 2A | | | |
| S. aureus | | | Target | |
| 1st Tier | DNA | | Site | Seq |
| gRNA Name | Strand | Targeting Domain | Length | ID |
| TP53BP1- | + | GAGUGCAGUGGGCUCUGAAGGC | 22 | 427 |
| 41 | | | | |
| TP53BP1- | + | GCGGUGGCGACAGCGGCGACCU | 22 | 428 |
| 42 | | | | |

[0677] Table II.2B provides exemplary targeting domains of gRNAs to be used with an eiCas9 fusion molecule (e.g., an eiCas9 fused to a transcription activator or repressor domain) to alter (e.g., activate or repress) a gene, e.g., TP53BP1 gene. The targeting domains of gRNAs were selected according to the second tier parameters. The targeting domains bind within 500 bp spanning a transcription start site (TSS), e.g., upstream or downstream of a TSS, have a high level of orthogonality and PAM is NNGRRT. It is contemplated herein that in an embodiment the targeting domain hybridizes to the target domain through complementary base pairing. Any of the targeting domains in the table can be used with a S. aureus eiCas9 fusion molecule (e.g., an eiCas9 fused to a transcription activator or repressor domain) to alter (e.g., activate or repress) the TP53BP1 gene. One or more gRNA may be used to target an eiCas9 fusion molecule to a region spanning 500 bp of a transcription start site (TSS) of the TP53BP1 gene.

TABLE II.2B
Exemplary HDR-enhancing gRNAs Targeting a TP53B1 Gene

| S. aureus | A high level of orthogonality, and PAM is NNGRRT | | | |
|---|---|---|---|---|
| 2nd Tier | 2B | | | |
| gRNA | | | Target Site | |
| Name | DNA Strand | Targeting Domain | Length | Seq ID |
| TP53BP1-43 | − | CGCCCGCCACUCAAGAAAUCCC | 22 | 429 |
| TP53BP1-44 | − | CGUGGAUGAUAGGUAGCUGCGG | 22 | 430 |
| TP53BP1-45 | + | CUGGUACUGUUUGGAGAGAAAU | 22 | 431 |
| TP53BP1-46 | + | UACCUAUCAUCCACGGGAUUUC | 22 | 432 |
| TP53BP1-47 | + | UCGAGCGCGAGGGACCUCCCGC | 22 | 433 |
| TP53BP1-48 | + | UCUUGAGUGGCGGGCGGCGGCA | 22 | 434 |
| TP53BP1-49 | + | UGCCGCAGCUACCUAUCAUCCA | 22 | 435 |
| TP53BP1-50 | + | UUGUGUGACGUGACGGGAAAGG | 22 | 436 |
| TP53BP1-51 | − | UUUCCCGUCACGUCACACAAUA | 22 | 437 |

[0678] Table II.3A provides exemplary targeting domains of gRNAs to be used with an eiCas9 fusion molecule (e.g., an eiCas9 fused to a transcription activator or repressor domain) to alter (e.g., activate or repress) a gene, e.g., RIF1 gene. The targeting domains of gRNAs were selected according to the first tier parameters. The targeting domains bind within 500 bp spanning a transcription start site (TSS), e.g., upstream or downstream of a TSS, have a high level of orthogonality and start with a 5′G. It is contemplated herein that in an embodiment the targeting domain hybridizes to the target domain through complementary base pairing. Any of the targeting domains in the table can be used with a S. pyogenes eiCas9 fusion molecule (e.g., an eiCas9 fused to a transcription activator or repressor domain) to alter (e.g., activate or repress) the RIF1 gene. One or more gRNA may be used to target an eiCas9 fusion molecule to a region spanning 500 bp of a transcription start site (TSS) of the RIF1 gene.

TABLE II.3A
Exemplary HDR-enhancing gRNAs
Targeting a RIF1 Gene

| | A high level of orthogonality, | | | |
|---|---|---|---|---|
| | and starts with a G | | | |
| | 3A | | | |
| S. pyogenes | | | Target | |
| 1st Tier | DNA | | Site | Seq |
| gRNA Name | Strand | Targeting Domain | Length | ID |
| RIF1-1 | − | GAACGAGGCAUCUCGCCGCG | 20 | 438 |
| RIF1-2 | − | GAGCUCGACUUUCCCAGCUC | 20 | 439 |
| RIF1-3 | + | GAUAAAUAUCGGGGUGACAG | 20 | 440 |
| RIF1-4 | − | GCCCAGGAGUGCGCGGGAGU | 20 | 441 |
| RIF1-5 | + | GCCGCCAUCUUGGUCUAGGA | 20 | 442 |
| RIF1-6 | − | GCGCGGGAGUAGGUUAGGCC | 20 | 443 |
| RIF1-7 | − | GGAGGAGAUCGGCGGAGGGC | 20 | 444 |
| RIF1-8 | − | GGAGUGCGCGGGAGUAGGUU | 20 | 445 |
| RIF1-9 | − | GGCAGACUGAGGGUUCCCCG | 20 | 446 |
| RIF1-10 | − | GGCAUCUCGCCGCGAGGGGG | 20 | 447 |
| RIF1-11 | + | GGCCCGCCCAGCCGCCAUCU | 20 | 448 |
| RIF1-12 | + | GGCGAGAUGCCUCGUUCCCC | 20 | 449 |
| RIF1-13 | − | GGGAGGAGAUCGGCGGAGGG | 20 | 450 |
| RIF1-14 | − | GGGAGUAGGUUAGGCCUGGC | 20 | 451 |
| RIF1-15 | − | GGGCAGCUUUCAACAGAGGG | 20 | 452 |
| RIF1-16 | + | GGGGUGACAGUGGUAGGCCG | 20 | 453 |
| RIF1-17 | + | GGGUGACAGUGGUAGGCCGC | 20 | 454 |
| RIF1-18 | + | GGUGACAGUGGUAGGCCGCG | 20 | 455 |
| RIF1-19 | + | GUCGAGCUCUGGCAGCGUCU | 20 | 456 |
| RIF1-20 | + | GUGAGUAAACAGCCGGAGCU | 20 | 457 |

[0679] Table II.31B provides exemplary targeting domains of gRNAs to be used with an eiCas9 fusion molecule (e.g., an eiCas9 fused to a transcription activator or repressor domain) to alter (e.g., activate or repress) a gene, e.g., RIF1 gene. The targeting domains of gRNAs were selected according to the second tier parameters. The targeting domains bind within 500 bp spanning a transcription start site (TSS), e.g., upstream or downstream of a TSS and have a high level of orthogonality. It is contemplated herein that in an embodiment the targeting domain hybridizes to the target domain through complementary base pairing. Any of the targeting domains in the table can be used with a S. pyogenes eiCas9 fusion molecule (e.g., an eiCas9 fused to a transcription activator or repressor domain) to alter (e.g., activate or repress) the RIF1 gene. One or more gRNA may be used to target an eiCas9 fusion molecule to a region spanning 500 bp of a transcription start site (TSS) of the RIF1 gene.

TABLE II.3B
Exemplary HDR-enhancing gRNAs
Targeting a RIF1 Gene

| | A high level of orthogonality | | | |
|---|---|---|---|---|
| | 3B | | | |
| S. pyogenes | | | Target | |
| 2nd Tier | DNA | | Site | Seq |
| gRNA Name | Strand | Targeting Domain | Length | ID |
| RIF1-21 | + | AACCUACUCCCGCGCACUCC | 20 | 458 |
| RIF1-22 | − | AACGAGGCAUCUCGCCGCGA | 20 | 459 |
| RIF1-23 | + | AAUAUCGGGGUGACAGUGGU | 20 | 460 |
| RIF1-24 | − | ACGAGGCAUCUCGCCGCGAG | 20 | 461 |
| RIF1-25 | + | AGGGAGGCGAUCGAUAACUC | 20 | 462 |
| RIF1-26 | + | AGUCGAGCUCUGGCAGCGUC | 20 | 463 |
| RIF1-27 | − | CCACCUAGGAAGAUCAGGAC | 20 | 464 |
| RIF1-28 | − | CCCCGAUAUUUAUCCCACCU | 20 | 465 |
| RIF1-29 | − | CCUAGACCAAGAUGGCGGCU | 20 | 466 |
| RIF1-30 | − | CGAGGCAUCUCGCCGCGAGG | 20 | 467 |
| RIF1-31 | + | CGCACGCGUGAGUAAACAGC | 20 | 468 |
| RIF1-32 | + | CGGCGAGAUGCCUCGUUCCC | 20 | 469 |
| RIF1-33 | + | CGUGAGUAAACAGCCGGAGC | 20 | 470 |
| RIF1-34 | − | UCCAACAGUCAGCGGCACAC | 20 | 471 |
| RIF1-35 | + | UCCGGUGUGCCGCUGACUGU | 20 | 472 |
| RIF1-36 | − | UCUCGCCGCGAGGGGGCGGA | 20 | 473 |
| RIF1-37 | + | UGGCUCGAACUUCUCCCGCC | 20 | 474 |
| RIF1-38 | + | UGUGCCGCUGACUGUUGGAU | 20 | 475 |
| RIF1-39 | − | UUAUCCCACCUAGGAAGAUC | 20 | 476 |
| RIF1-40 | + | UUCCUAGGUGGGAUAAAUAU | 20 | 477 |

[0680] Table II.4A provides exemplary targeting domains of gRNAs to be used with an eiCas9 fusion molecule (e.g., an eiCas9 fused to a transcription activator or repressor domain) to alter (e.g., activate or repress) a gene, e.g., RIF1 gene. The targeting domains of gRNAs were selected according to the first tier parameters. The targeting domains bind within 500 bp spanning a transcription start site (TSS), e.g., upstream or downstream of a TSS, have a high level of orthogonality, start with a 5′G and PAM is NNGRRT. It is contemplated herein that in an embodiment the targeting domain hybridizes to the target domain through complementary base pairing. Any of the targeting domains in the table can be used with a S. aureus eiCas9 fusion molecule (e.g., an eiCas9 fused to a transcription activator or repressor domain) to alter (e.g., activate or repress) the RIF1 gene. One or more gRNA may be used to target an eiCas9 fusion molecule to a region spanning 500 bp of a transcription start site (TSS) of the RIF1 gene.

TABLE II.4A
Exemplary HDR-enhancing gRNAs
Targeting a RIF1 Gene

| | A high level of orthogonality, | | | |
|---|---|---|---|---|
| | starts with a G, PAM is NNGRRT | | | |
| | 4A | | | |
| S. aureus | | | Target | |
| 1st Tier | DNA | | Site | Seq |
| gRNA Name | Strand | Targeting Domain | Length | ID |
| RIF1-41 | + | GAAAGUCGAGCUCUGGCAGCGU | 22 | 478 |
| RIF1-42 | − | GGCAUCUCGCCGCGAGGGGGCG | 22 | 479 |
| RIF1-43 | − | GGGGGCGGAGGGUGGGCAGACU | 22 | 480 |

[0681] Table II.41B provides exemplary targeting domains of gRNAs to be used with an eiCas9 fusion molecule (e.g., an eiCas9 fused to a transcription activator or repressor domain) to alter (e.g., activate or repress) a gene, e.g., RIF1 gene. The targeting domains of gRNAs were selected according to the second tier parameters. The targeting domains bind within 500 bp spanning a transcription start site (TSS), e.g., upstream or downstream of a TSS, have a high level of orthogonality and PAM is NNGRRT. It is contemplated herein that in an embodiment the targeting domain hybridizes to the target domain through complementary base pairing. Any of the targeting domains in the table can be used with a S. aureus eiCas9 fusion molecule (e.g., an eiCas9 fused to a transcription activator or repressor domain) to alter (e.g., activate or repress) the RIF1 gene. One or more gRNA may be used to target an eiCas9 fusion molecule to a region spanning 500 bp of a transcription start site (TSS) of the RIF1 gene.

TABLE II.4B
Exemplary HDR-enhancing gRNAs Targeting a RIF1 Gene

| | A high level of orthogonality, and PAM is NNGRRT | | | |
|---|---|---|---|---|
| S. aureus | 4B | | | |
| 2nd Tier | | | Target Site | |
| gRNA Name | DNA Strand | Targeting Domain | Length | Seq ID |
| RIF1-44 | + | AACUCCGGUGUGCCGCUGACUG | 22 | 481 |
| RIF1-45 | − | AAGAUGGCGGCUGGGCGGGCCC | 22 | 482 |
| RIF1-46 | − | AAUCCAACAGUCAGCGGCACAC | 22 | 483 |
| RIF1-47 | + | ACCCUGUCCUGAUCUUCCUAGG | 22 | 484 |
| RIF1-48 | − | AUCCCACCUAGGAAGAUCAGGA | 22 | 485 |
| RIF1-49 | − | CUGGGCGGGCCCAGGAGUGCGC | 22 | 486 |
| RIF1-50 | + | UAGGAGGGAGCGCGCCGCACGC | 22 | 487 |
| RIF1-51 | + | UCUUCCUAGGUGGGAUAAAUAU | 22 | 488 |

[0682] Table II.5A provides exemplary targeting domains of gRNAs to be used with an eiCas9 fusion molecule (e.g., an eiCas9 fused to a transcription activator or repressor domain) to alter (e.g., activate or repress) a gene, e.g., PAXIP1 gene. The targeting domains of gRNAs were selected according to the first tier parameters. The targeting domains bind within 500 bp spanning a transcription start site (TSS), e.g., upstream or downstream of a TSS, have a high level of orthogonality and start with a 5′G. It is contemplated herein that in an embodiment the targeting domain hybridizes to the target domain through complementary base pairing. Any of the targeting domains in the table can be used with a S. pyogenes eiCas9 fusion molecule (e.g., an eiCas9 fused to a transcription activator or repressor domain) to alter (e.g., activate or repress) the PAXIP1 gene. One or more gRNA may be used to target an eiCas9 fusion molecule to a region spanning 500 bp of a transcription start site (TSS) of the PAXIP1 gene.

TABLE II.5A
Exemplary HDR-enhancing gRNAs
Targeting a PAXIP1 Gene

| | A high level of orthogonality, | | | |
|---|---|---|---|---|
| | and starts with a G | | | |
| | 5A | | | |
| S. pyogenes | | | Target | |
| 1st Tier | DNA | | Site | Seq |
| gRNA Name | Strand | Targeting Domain | Length | ID |
| PAXIP1-1 | − | GAACAUCUCCUCAGGAACUU | 20 | 489 |
| PAXIP1-2 | − | GCCCCCACUCGCCCCGCCAA | 20 | 490 |
| PAXIP1-3 | + | GCCGUUGGCGGGGCGAGUGG | 20 | 491 |
| PAXIP1-4 | − | GCGCCGAGCGCCCGAAGCGC | 20 | 492 |
| PAXIP1-5 | + | GCGCCGCCGCGGAGCCUCCC | 20 | 493 |
| PAXIP1-6 | + | GCGCGCGGCUCCCGCGCUUC | 20 | 494 |
| PAXIP1-7 | + | GCGCGGGCAGGGCCGUUGGC | 20 | 495 |
| PAXIP1-8 | + | GCGCUCCCCCUCGGUGGCCG | 20 | 496 |
| PAXIP1-9 | + | GCGGGAUGGUGCGUCCCGCA | 20 | 497 |
| PAXIP1-10 | + | GCUCCCGCGCUUCGGGCGCU | 20 | 498 |
| PAXIP1-11 | + | GGACCCCGAUUCGCAGGACC | 20 | 499 |
| PAXIP1-12 | + | GGACCGGGCCCGGGCUGCGC | 20 | 500 |
| PAXIP1-13 | + | GGCCGUUGGCGGGGCGAGUG | 20 | 501 |
| PAXIP1-14 | + | GGCGCUCCCCCUCGGUGGCC | 20 | 502 |
| PAXIP1-15 | + | GGCGGGAUGGUGCGUCCCGC | 20 | 503 |
| PAXIP1-16 | + | GGCUGCGCGGGCAGGGCCGU | 20 | 504 |
| PAXIP1-17 | − | GGGAGCCGCGCGCGCCCUGC | 20 | 505 |
| PAXIP1-18 | + | GGGAGCGGACCCCGAUUCGC | 20 | 506 |
| PAXIP1-19 | − | GGGCCCGGUCCUGCGAAUCG | 20 | 507 |
| PAXIP1-20 | + | GGGCCGUUGGCGGGGCGAGU | 20 | 508 |

[0683] Table II.51 provides exemplary targeting domains of gRNAs to be used with an eiCas9 fusion molecule (e.g., an eiCas9 fused to a transcription activator or repressor domain) to alter (e.g., activate or repress) a gene, e.g., PAXIP1 gene. The targeting domains of gRNAs were selected according to the second tier parameters. The targeting domains bind within 500 bp spanning a transcription start site (TSS), e.g., upstream or downstream of a TSS and have a high level of orthogonality. It is contemplated herein that in an embodiment the targeting domain hybridizes to the target domain through complementary base pairing. Any of the targeting domains in the table can be used with a S. pyogenes eiCas9 fusion molecule (e.g., an eiCas9 fused to a transcription activator or repressor domain) to alter (e.g., activate or repress) the PAXIP1 gene. One or more gRNA may be used to target an eiCas9 fusion molecule to a region spanning 500 bp of a transcription start site (TSS) of the PAXIP1 gene.

TABLE II.5B
Exemplary HDR-enhancing gRNAs
Targeting a PAXIP1 Gene

| | A high level of orthogonality | | | |
|---|---|---|---|---|
| | 5B | | | |
| S. pyogenes | | | Target | |
| 2nd Tier | DNA | | Site | Seq |
| gRNA Name | Strand | Targeting Domain | Length | ID |
| PAXIP1-21 | − | AACAUCUCCUCAGGAACUUU | 20 | 509 |
| PAXIP1-22 | − | CAUGAUCGCGGCGGCCCGGG | 20 | 510 |
| PAXIP1-23 | + | CCAGGCGCCCAAAGUUCCUG | 20 | 511 |
| PAXIP1-24 | − | CCGACAUGAUCGCGGCGGCC | 20 | 512 |
| PAXIP1-25 | + | CCGAUUCGCAGGACCGGGCC | 20 | 513 |
| PAXIP1-26 | − | CCGGGCCCGGUCCUGCGAAU | 20 | 514 |
| PAXIP1-27 | + | CCGGGCCGCCGCGAUCAUGU | 20 | 515 |
| PAXIP1-28 | − | CCUCAGGAACUUUGGGCGCC | 20 | 516 |
| PAXIP1-29 | − | CGACAUGAUCGCGGCGGCCC | 20 | 517 |
| PAXIP1-30 | + | CGAUUCGCAGGACCGGGCCC | 20 | 518 |
| PAXIP1-31 | + | CGCCGCGAUCAUGUCGGACC | 20 | 519 |
| PAXIP1-32 | − | CGCCUGGUCCGACAUGAUCG | 20 | 520 |
| PAXIP1-33 | − | CGCGCCGAGCGCCCGAAGCG | 20 | 521 |
| PAXIP1-34 | + | CGCGCGCGGCUCCCGCGCUU | 20 | 522 |
| PAXIP1-35 | + | CGCGCUUCGGGCGCUCGGCG | 20 | 523 |
| PAXIP1-36 | + | CGGACCCCGAUUCGCAGGAC | 20 | 524 |
| PAXIP1-37 | − | CGGGACGCACCAUCCCGCCC | 20 | 525 |
| PAXIP1-38 | − | CGGGCCCGGUCCUGCGAAUC | 20 | 526 |
| PAXIP1-39 | − | CUGGUCCGACAUGAUCGCGG | 20 | 527 |
| PAXIP1-40 | + | UGCGUCCCGCAGGGCGCGCG | 20 | 528 |

[0684] Table II.6A provides exemplary targeting domains of gRNAs to be used with an eiCas9 fusion molecule (e.g., an eiCas9 fused to a transcription activator or repressor domain) to alter (e.g., activate or repress) a gene, e.g., PAXIP1 gene. The targeting domains of gRNAs were selected according to the first tier parameters. The targeting domains bind within 500 bp spanning a transcription start site (TSS), e.g., upstream or downstream of a TSS, have a high level of orthogonality, start with a 5′G and PAM is NNGRRT. It is contemplated herein that in an embodiment the targeting domain hybridizes to the target domain through complementary base pairing. Any of the targeting domains in the table can be used with a S. aureus eiCas9 fusion molecule (e.g., an eiCas9 fused to a transcription activator or repressor domain) to alter (e.g., activate or repress) the PAXIP1 gene. One or more gRNA may be used to target an eiCas9 fusion molecule to a region spanning 500 bp of a transcription start site (TSS) of the PAXIP1 gene.

TABLE II.6A
Exemplary HDR-enhancing gRNAs Targeting a PAXIP1
Gene

| | A high level of orthogonality, | | | |
|---|---|---|---|---|
| | starts with a G, PAM is NNGRRT | | | |
| | 6A | | | |
| S. aureus | | | Target | |
| 1st Tier | DNA | | Site | Seq |
| gRNA Name | Strand | Targeting Domain | Length | ID |
| PAXIP1-41 | − | GCCCGGGCCCGGUCCUGCGAAU | 22 | 529 |
| PAXIP1-42 | + | GGCGCCGCGGGGGCCGGGGGCG | 22 | 530 |

[0685] Table II.6B provides exemplary targeting domains of gRNAs to be used with an eiCas9 fusion molecule (e.g., an eiCas9 fused to a transcription activator or repressor domain) to alter (e.g., activate or repress) a gene, e.g., PAXIP1 gene. The targeting domains of gRNAs were selected according to the second tier parameters. The targeting domains bind within 500 bp spanning a transcription start site (TSS), e.g., upstream or downstream of a TSS, have a high level of orthogonality and PAM is NNGRRT. It is contemplated herein that in an embodiment the targeting domain hybridizes to the target domain through complementary base pairing. Any of the targeting domains in the table can be used with a S. aureus eiCas9 fusion molecule (e.g., an eiCas9 fused to a transcription activator or repressor domain) to alter (e.g., activate or repress) the PAXIP1 gene. One or more gRNA may be used to target an eiCas9 fusion molecule to a region spanning 500 bp of a transcription start site (TSS) of the PAXIP1 gene.

TABLE II.6B
Exemplary HDR-enhancing gRNAs Targeting a PAXIP1
Gene

| | A high level of orthogonality, | | | |
|---|---|---|---|---|
| | and PAM is NNGRRT | | | |
| | 6B | | | |
| S. aureus | | | Target | |
| 2nd Tier | DNA | | Site | Seq |
| gRNA Name | Strand | Targeting Domain | Length | ID |
| PAXIP1-43 | − | CGCGCAGCCCGGGCCCGGUCCU | 22 | 531 |
| PAXIP1-44 | + | CGCGGGCAGGGCCGUUGGCGGG | 22 | 532 |
| PAXIP1-45 | + | CGCUCCCCCUCGGUGGCCGGGG | 22 | 533 |

[0686] Table II.7A provides exemplary targeting domains of gRNAs to be used with an eiCas9 fusion molecule (e.g., an eiCas9 fused to a transcription activator or repressor domain) to alter (e.g., activate or repress) a gene, e.g., XRCC6 gene. The targeting domains of gRNAs were selected according to the first tier parameters. The targeting domains bind within 500 bp spanning a transcription start site (TSS), e.g., upstream or downstream of a TSS, have a high level of orthogonality and start with a 5′G. It is contemplated herein that in an embodiment the targeting domain hybridizes to the target domain through complementary base pairing. Any of the targeting domains in the table can be used with a S. pyogenes eiCas9 fusion molecule (e.g., an eiCas9 fused to a transcription activator or repressor domain) to alter (e.g., activate or repress) the XRCC6 gene. One or more gRNA may be used to target an eiCas9 fusion molecule to a region spanning 500 bp of a transcription start site (TSS) of the XRCC6 gene.

TABLE II.7A
Exemplary HDR-enhancing gRNAs Targeting a XRCC6
Gene

| | A high level of orthogonality, | | | |
|---|---|---|---|---|
| | and starts with a G | | | |
| | 7A | | | |
| S. pyogenes | | | Target | |
| 1st Tier | DNA | | Site | Seq |
| gRNA Name | Strand | Targeting Domain | Length | ID |
| XRCC6-1 | − | GACGACAAUCCACGCAUGCG | 20 | 534 |
| XRCC6-2 | − | GAGCGAAGCGGGACGAGGCC | 20 | 535 |
| XRCC6-3 | + | GAGGCGGCACCUCGCGUUUG | 20 | 536 |
| XRCC6-4 | + | GAGGGCCCACACGGAAGAGG | 20 | 537 |
| XRCC6-5 | − | GAGGUGCCGCCUCCUUCCCG | 20 | 538 |
| XRCC6-6 | − | GAUAACGGCCCGCUUACCUU | 20 | 539 |
| XRCC6-7 | + | GCACAUGCGUGAUGACGUAG | 20 | 540 |
| XRCC6-8 | − | GCAUGCGCGGGCCCUGUACU | 20 | 541 |
| XRCC6-9 | + | GCCCCCAUAGCCUUGCUAGA | 20 | 542 |
| XRCC6-10 | − | GCCCCGCCCCUUCCUACGUC | 20 | 543 |
| XRCC6-11 | − | GCCCGCUUACCUUUGGCGCA | 20 | 544 |
| XRCC6-12 | + | GCCUUAAGUGUGCGAAUCCG | 20 | 545 |
| XRCC6-13 | − | GCGAGACCGACCGAGCGAAG | 20 | 546 |
| XRCC6-14 | + | GGACAUAGGUAGAAGCUGGU | 20 | 547 |
| XRCC6-15 | − | GGCCCGCUUACCUUUGGCGC | 20 | 548 |
| XRCC6-16 | + | GGGCGGGGCUUUGCCGAAGG | 20 | 549 |
| XRCC6-17 | + | GGGGCGGGGCUCUCGCUGAU | 20 | 550 |
| XRCC6-18 | + | GGGGCGGGGCUUUGCCGAAG | 20 | 551 |
| XRCC6-19 | + | GUACAGGGCCCGCGCAUGCG | 20 | 552 |
| XRCC6-20 | + | GUUGAUUGGGACCGAGUACA | 20 | 553 |

[0687] Table II.71 provides exemplary targeting domains of gRNAs to be used with an eiCas9 fusion molecule (e.g., an eiCas9 fused to a transcription activator or repressor domain) to alter (e.g., activate or repress) a gene, e.g., XRCC6 gene. The targeting domains of gRNAs were selected according to the second tier parameters. The targeting domains bind within 500 bp spanning a transcription start site (TSS), e.g., upstream or downstream of a TSS and have a high level of orthogonality. It is contemplated herein that in an embodiment the targeting domain hybridizes to the target domain through complementary base pairing. Any of the targeting domains in the table can be used with a S. pyogenes eiCas9 fusion molecule (e.g., an eiCas9 fused to a transcription activator or repressor domain) to alter (e.g., activate or repress) the XRCC6 gene. One or more gRNA may be used to target an eiCas9 fusion molecule to a region spanning 500 bp of a transcription start site (TSS) of the XRCC6 gene.

TABLE II.7B
Exemplary HDR-enhancing gRNAs Targeting a XRCC6
Gene

| | A high level of orthogonality | | | |
|---|---|---|---|---|
| | 7B | | | |
| S. pyogenes | | | Target | |
| 2nd Tier | DNA | | Site | Seq |
| gRNA Name | Strand | Targeting Domain | Length | ID |
| XRCC6-21 | + | ACCACGCUCCUUCCUCGGGA | 20 | 554 |
| XRCC6-22 | − | ACGACAAUCCACGCAUGCGC | 20 | 555 |
| XRCC6-23 | + | AUGACGUAGAGGGCGUUGAU | 20 | 556 |
| XRCC6-24 | + | CACAUGCGUGAUGACGUAGA | 20 | 557 |
| XRCC6-25 | − | CGACCGAGCGAAGCGGGACG | 20 | 558 |
| XRCC6-26 | − | CGAGACCGACCGAGCGAAGC | 20 | 559 |
| XRCC6-27 | − | CGCACUAUAUCGCGUCAGGC | 20 | 560 |
| XRCC6-28 | + | CGCCCCCAUAGCCUUGCUAG | 20 | 561 |
| XRCC6-29 | + | CGGGGCUCUCGCUGAUGGGU | 20 | 562 |
| XRCC6-30 | + | CGUUGAUUGGGACCGAGUAC | 20 | 563 |
| XRCC6-31 | − | CUAACGCUAACCCUCUAGCA | 20 | 564 |
| XRCC6-32 | + | CUCGUCCCGCUUCGCUCGGU | 20 | 565 |
| XRCC6-33 | + | CUGAUGGGUUGGCUUUCGUC | 20 | 566 |
| XRCC6-34 | + | UCCCUGCGCCAAAGGUAAGC | 20 | 567 |
| XRCC6-35 | − | UCCUCGGAUUCGCACACUUA | 20 | 568 |
| XRCC6-36 | − | UCGAGUCUGUCGCUGCUCCU | 20 | 569 |
| XRCC6-37 | + | UGACGUAGAGGGCGUUGAUU | 20 | 570 |
| XRCC6-38 | + | UGGUCGCUUCCCUGCGCCAA | 20 | 571 |
| XRCC6-39 | − | UGUGCGCACUAUAUCGCGUC | 20 | 572 |
| XRCC6-40 | + | UGUUGUUCGCCAGCUAGGCC | 20 | 573 |

[0688] Table II.8A provides exemplary targeting domains of gRNAs to be used with an eiCas9 fusion molecule (e.g., an eiCas9 fused to a transcription activator or repressor domain) to alter (e.g., activate or repress) a gene, e.g., XRCC6 gene. The targeting domains of gRNAs were selected according to the first tier parameters. The targeting domains bind within 500 bp spanning a transcription start site (TSS), e.g., upstream or downstream of a TSS, have a high level of orthogonality, start with a 5′G and PAM is NNGRRT. It is contemplated herein that in an embodiment the targeting domain hybridizes to the target domain through complementary base pairing. Any of the targeting domains in the table can be used with a S. aureus eiCas9 fusion molecule (e.g., an eiCas9 fused to a transcription activator or repressor domain) to alter (e.g., activate or repress) the XRCC6 gene. One or more gRNA may be used to target an eiCas9 fusion molecule to a region spanning 500 bp of a transcription start site (TSS) of the XRCC6 gene.

TABLE II.8A
Exemplary HDR-enhancing gRNAs Targeting a XRCC6
Gene

| | A high level of orthogonality, | | | |
|---|---|---|---|---|
| | starts with a G, PAM is NNGRRT | | | |
| | 8A | | | |
| S. aureus | | | Target | |
| 1st Tier | DNA | | Site | Seq |
| gRNA Name | Strand | Targeting Domain | Length | ID |
| XRCC6-41 | + | GAAGGGGGCGGGGCUCUCGCUG | 22 | 574 |
| XRCC6-42 | − | GCCUAGCUGGCGAACAACACAA | 22 | 575 |
| XRCC6-43 | + | GCGCGCCCCCAUAGCCUUGCUA | 22 | 576 |
| XRCC6-44 | + | GGACAUAGGUAGAAGCUGGUUG | 22 | 577 |
| XRCC6-45 | + | GGUUAGCGUUAGCCUUAAGUGU | 22 | 578 |
| XRCC6-46 | − | GUCUCGAGUCUGUCGCUGCUCC | 22 | 579 |

[0689] Table II.8B provides exemplary targeting domains of gRNAs to be used with an eiCas9 fusion molecule (e.g., an eiCas9 fused to a transcription activator or repressor domain) to alter (e.g., activate or repress) a gene, e.g., XRCC6 gene. The targeting domains of gRNAs were selected according to the second tier parameters. The targeting domains bind within 500 bp spanning a transcription start site (TSS), e.g., upstream or downstream of a TSS, have a high level of orthogonality and PAM is NNGRRT. It is contemplated herein that in an embodiment the targeting domain hybridizes to the target domain through complementary base pairing. Any of the targeting domains in the table can be used with a S. aureus eiCas9 fusion molecule (e.g., an eiCas9 fused to a transcription activator or repressor domain) to alter (e.g., activate or repress) the XRCC6 gene. One or more gRNA may be used to target an eiCas9 fusion molecule to a region spanning 500 bp of a transcription start site (TSS) of the XRCC6 gene.

TABLE II.8B
Exemplary HDR-enhancing gRNAs Targeting a XRCC6
Gene

| | A high level of orthogonality, | | | |
|---|---|---|---|---|
| | and PAM is NNGRRT | | | |
| | 8B | | | |
| S. aureus | | | Target | |
| 2nd Tier | DNA | | Site | Seq |
| gRNA Name | Strand | Targeting Domain | Length | ID |
| XRCC6-47 | + | ACACGGAAGAGGGGGCGGGGGC | 22 | 580 |
| XRCC6-48 | + | ACGUAGAGGGCGUUGAUUGGGA | 22 | 581 |
| XRCC6-49 | + | CGAGUACAGGGCCCGCGCAUGC | 22 | 582 |
| XRCC6-50 | − | UUCCCGAGGAAGGAGCGUGGUC | 22 | 583 |

[0690] Table II.9A provides exemplary targeting domains of gRNAs to be used with an eiCas9 fusion molecule (e.g., an eiCas9 fused to a transcription activator or repressor domain) to alter (e.g., activate or repress) a gene, e.g., XRCC5 gene. The targeting domains of gRNAs were selected according to the first tier parameters. The targeting domains bind within 500 bp spanning a transcription start site (TSS), e.g., upstream or downstream of a TSS, have a high level of orthogonality and start with a 5′G. It is contemplated herein that in an embodiment the targeting domain hybridizes to the target domain through complementary base pairing. Any of the targeting domains in the table can be used with a S. pyogenes eiCas9 fusion molecule (e.g., an eiCas9 fused to a transcription activator or repressor domain) to alter (e.g., activate or repress) the XRCC5 gene. One or more gRNA may be used to target an eiCas9 fusion molecule to a region spanning 500 bp of a transcription start site (TSS) of the XRCC5 gene.

TABLE II.9A
Exemplary HDR-enhancing gRNAs Targeting a XRCC5
Gene

| | A high level of orthogonality, | | | |
|---|---|---|---|---|
| | and starts with a G | | | |
| | 9A | | | |
| S. pyogenes | | | Target | |
| 1st Tier | DNA | | Site | Seq |
| gRNA Name | Strand | Targeting Domain | Length | ID |
| XRCC5-1 | + | GAAGCGAGUUGCGACACGGC | 20 | 584 |
| XRCC5-2 | + | GACCGGCAACAUGGUGCGGU | 20 | 585 |
| XRCC5-3 | + | GACUUGGGCUUUACCCGGAC | 20 | 586 |
| XRCC5-4 | + | GAGAAUGUGCGCAUGCUCGG | 20 | 587 |
| XRCC5-5 | − | GAGCCGCUUCGUUUCCUGCU | 20 | 588 |
| XRCC5-6 | − | GCACCAUGUUGCCGGUCCUC | 20 | 589 |
| XRCC5-7 | − | GCCGUGUCGCAACUCGCUUC | 20 | 590 |
| XRCC5-8 | + | GCGCCUGAGGACCGGCAACA | 20 | 591 |
| XRCC5-9 | − | GCGCUUUGGUCGCUUCUUCC | 20 | 592 |
| XRCC5-10 | + | GCUAUCUGCCGCUUGUCCAC | 20 | 593 |
| XRCC5-11 | + | GGAAUCUGCGCGAGCUCGGC | 20 | 594 |
| XRCC5-12 | + | GGAGAGAAUGUGCGCAUGCU | 20 | 595 |
| XRCC5-13 | + | GGCCGGAAUCUGCGCGAGCU | 20 | 596 |
| XRCC5-14 | − | GGCGCUUUGGUCGCUUCUUC | 20 | 597 |
| XRCC5-15 | + | GGGAAUCUGCGCAAGCUCGG | 20 | 598 |
| XRCC5-16 | + | GGGAAUCUGCGCAUGCUCGG | 20 | 599 |
| XRCC5-17 | − | GGGGCGGGGAAACCGUGCCC | 20 | 600 |
| XRCC5-18 | − | GGUGGACAAGCGGCAGAUAG | 20 | 601 |
| XRCC5-19 | − | GUGUCGCAACUCGCUUCCGG | 20 | 602 |
| XRCC5-20 | − | GUUUCCUGCUAGGCCUGAAA | 20 | 603 |

[0691] Table II.91B provides exemplary targeting domains of gRNAs to be used with an eiCas9 fusion molecule (e.g., an eiCas9 fused to a transcription activator or repressor domain) to alter (e.g., activate or repress) a gene, e.g., XRCC5 gene. The targeting domains of gRNAs were selected according to the second tier parameters. The targeting domains bind within 500 bp spanning a transcription start site (TSS), e.g., upstream or downstream of a TSS and have a high level of orthogonality. It is contemplated herein that in an embodiment the targeting domain hybridizes to the target domain through complementary base pairing. Any of the targeting domains in the table can be used with a S. pyogenes eiCas9 fusion molecule (e.g., an eiCas9 fused to a transcription activator or repressor domain) to alter (e.g., activate or repress) the XRCC5 gene. One or more gRNA may be used to target an eiCas9 fusion molecule to a region spanning 500 bp of a transcription start site (TSS) of the XRCC5 gene.

TABLE II.9B
Exemplary HDR-enhancing gRNAs Targeting a XRCC5
Gene

| | A high level of orthogonality | | | |
|---|---|---|---|---|
| | 9B | | | |
| S. pyogenes | | | Target | |
| 2nd Tier | DNA | | Site | Seq |
| gRNA Name | Strand | Targeting Domain | Length | ID |
| XRCC5-21 | + | ACCGGAAGCGAGUUGCGACA | 20 | 604 |
| XRCC5-22 | + | ACCGGCAACAUGGUGCGGUC | 20 | 605 |
| XRCC5-23 | + | ACGGUUUCCCCGCCCCUUUC | 20 | 606 |
| XRCC5-24 | − | ACUCGCUUCCGGUGGACAAG | 20 | 607 |
| XRCC5-25 | + | ACUUGGGCUUUACCCGGACU | 20 | 608 |
| XRCC5-26 | + | AGAAGCGACCAAAGCGCCUG | 20 | 609 |
| XRCC5-27 | + | CAUGGUGCGGUCGGGGAAUA | 20 | 610 |
| XRCC5-28 | + | CCACACGCUCCCGACUACGG | 20 | 611 |
| XRCC5-29 | + | CCGCCCCUUUCAGGCCUAGC | 20 | 612 |
| XRCC5-30 | − | CCGCCGUAGUCGGGAGCGUG | 20 | 613 |
| XRCC5-31 | + | CCGGCAACAUGGUGCGGUCG | 20 | 614 |
| XRCC5-32 | − | CGCCGAGCUCGCGCAGAUUC | 20 | 615 |
| XRCC5-33 | + | CGCUCCCGACUACGGCGGAA | 20 | 616 |
| XRCC5-34 | − | CGUUUCCUGCUAGGCCUGAA | 20 | 617 |
| XRCC5-35 | − | CUCUCCAUUCCGCCGUAGUC | 20 | 618 |
| XRCC5-36 | + | CUGCGCAUGCUCAGAGUUCC | 20 | 619 |
| XRCC5-37 | − | UCUCUCCAUUCCGCCGUAGU | 20 | 620 |
| XRCC5-38 | + | UGCGCAUGCUCAGAGUUCCG | 20 | 621 |
| XRCC5-39 | − | UUGCCGGUCCUCAGGCGCUU | 20 | 622 |
| XRCC5-40 | − | UUUGGUCGCUUCUUCCGGGC | 20 | 623 |

[0692] Table II.10A provides exemplary targeting domains of gRNAs to be used with an eiCas9 fusion molecule (e.g., an eiCas9 fused to a transcription activator or repressor domain) to alter (e.g., activate or repress) a gene, e.g., XRCC5 gene. The targeting domains of gRNAs were selected according to the first tier parameters. The targeting domains bind within 500 bp spanning a transcription start site (TSS), e.g., upstream or downstream of a TSS, have a high level of orthogonality, start with a 5′G and PAM is NNGRRT. It is contemplated herein that in an embodiment the targeting domain hybridizes to the target domain through complementary base pairing. Any of the targeting domains in the table can be used with a S. aureus eiCas9 fusion molecule (e.g., an eiCas9 fused to a transcription activator or repressor domain) to alter (e.g., activate or repress) the XRCC5 gene. One or more gRNA may be used to target an eiCas9 fusion molecule to a region spanning 500 bp of a transcription start site (TSS) of the XRCC5 gene.

TABLE II.10A
Exemplary HDR-enhancing gRNA Targeting a XRCC5
Gene

| | A high level of orthogonality, | | | |
|---|---|---|---|---|
| | starts with a G, PAM is NNGRRT | | | |
| | 10A | | | |
| S. aureus | | | Target | |
| 1st Tier | DNA | | Site | Seq |
| gRNA Name | Strand | Targeting Domain | Length | ID |
| XRCC5-41 | + | GACCGGCAACAUGGUGCGGUCG | 22 | 624 |

[0693] Table II.10B provides exemplary targeting domains of gRNAs to be used with an eiCas9 fusion molecule (e.g., an eiCas9 fused to a transcription activator or repressor domain) to alter (e.g., activate or repress) a gene, e.g., XRCC5 gene. The targeting domains of gRNAs were selected according to the second tier parameters. The targeting domains bind within 500 bp spanning a transcription start site (TSS), e.g., upstream or downstream of a TSS, have a high level of orthogonality and PAM is NNGRRT. It is contemplated herein that in an embodiment the targeting domain hybridizes to the target domain through complementary base pairing. Any of the targeting domains in the table can be used with a S. aureus eiCas9 fusion molecule (e.g., an eiCas9 fused to a transcription activator or repressor domain) to alter (e.g., activate or repress) the XRCC5 gene. One or more gRNA may be used to target an eiCas9 fusion molecule to a region spanning 500 bp of a transcription start site (TSS) of the XRCC5 gene.

TABLE II.10B
Exemplary HDR-enhancing gRNAs Targeting a XRCC5
Gene

| | A high level of orthogonality, | | | |
|---|---|---|---|---|
| | and PAM is NNGRRT | | | |
| | 10B | | | |
| S. aureus | | | Target | |
| 2nd Tier | DNA | | Site | Seq |
| gRNA Name | Strand | Targeting Domain | Length | ID |
| XRCC5-42 | + | AGAGAAUCUGCGCAUGCUCGGC | 22 | 625 |
| XRCC5-43 | + | AGAGAAUGUGCGCAUGCUCGGC | 22 | 626 |
| XRCC5-44 | + | AUCUGCCGCUUGUCCACCGGAA | 22 | 627 |
| XRCC5-45 | + | CACCACACGCUCCCGACUACGG | 22 | 628 |
| XRCC5-46 | + | CCGGAAUCUGCGCGAGCUCGGC | 22 | 629 |
| XRCC5-47 | + | CGGGAAUCUGCGCAAGCUCGGC | 22 | 630 |
| XRCC5-48 | + | CGGGAAUCUGCGCAUGCUCGGA | 22 | 631 |
| XRCC5-49 | + | CGGGAAUCUGCGCAUGCUCGGC | 22 | 632 |
| XRCC5-50 | + | CUCCCGACUACGGCGGAAUGGA | 22 | 633 |
| XRCC5-51 | + | UCGGCGGGAAUCUGCGCAUGCU | 22 | 634 |

[0694] Table II.11A provides exemplary targeting domains of gRNAs to be used with an eiCas9 fusion molecule (e.g., an eiCas9 fused to a transcription activator or repressor domain) to alter (e.g., activate or repress) a gene, e.g., PRKDC gene. The targeting domains of gRNAs were selected according to the first tier parameters. The targeting domains bind within 500 bp spanning a transcription start site (TSS), e.g., upstream or downstream of a TSS, have a high level of orthogonality and start with a 5′G. It is contemplated herein that in an embodiment the targeting domain hybridizes to the target domain through complementary base pairing. Any of the targeting domains in the table can be used with a S. pyogenes eiCas9 fusion molecule (e.g., an eiCas9 fused to a transcription activator or repressor domain) to alter (e.g., activate or repress) the PRKDC gene. One or more gRNA may be used to target an eiCas9 fusion molecule to a region spanning 500 bp of a transcription start site (TSS) of the PRKDC gene.

TABLE II.11A
Exemplary HDR-enhancing gRNAs Targeting a PRKDC
Gene

| | A high level of orthogonality, | | | |
|---|---|---|---|---|
| | and starts with a G | | | |
| | 11A | | | |
| S. pyogenes | | | Target | |
| 1st Tier | DNA | | Site | Seq |
| gRNA Name | Strand | Targeting Domain | Length | ID |
| PRKDC-1 | + | GCACGCGCGGGAGCGGGACU | 20 | 635 |
| PRKDC-2 | + | GCAGCCCCGCCUCCGCGCGU | 20 | 636 |
| PRKDC-3 | + | GCCUUCCCGCAGGGGUCCCC | 20 | 637 |
| PRKDC-4 | − | GCGCCCGCUCGGCCCGGACC | 20 | 638 |
| PRKDC-5 | − | GCGCGUGCGCCCGCUCGGCC | 20 | 639 |
| PRKDC-6 | − | GCGGCGGCAGGAACUUUCCC | 20 | 640 |
| PRKDC-7 | + | GCGGGACUCGGCGGCAUGGC | 20 | 641 |
| PRKDC-8 | + | GCGGGCGCACGCGCGGGAGC | 20 | 642 |
| PRKDC-9 | − | GGAAAUGCCCCUACGCGCGG | 20 | 643 |
| PRKDC-10 | − | GGAGCAACGCACACCGGCUC | 20 | 644 |
| PRKDC-11 | + | GGCAUGGCGGGCUCCGGAGC | 20 | 645 |
| PRKDC-12 | + | GGCCAAAGAGGCGCGCUUAC | 20 | 646 |
| PRKDC-13 | − | GGCCAGUAAGCGCGCCUCUU | 20 | 647 |
| PRKDC-14 | + | GGCCGAGCGGGCGCACGCGC | 20 | 648 |
| PRKDC-15 | + | GGCCUUCCCGCAGGGGUCCC | 20 | 649 |
| PRKDC-16 | − | GGGACCCCUGCGGGAAGGCC | 20 | 650 |
| PRKDC-17 | + | GGGAGCGGGACUCGGCGGCA | 20 | 651 |
| PRKDC-18 | + | GGGCCGAGCGGGCGCACGCG | 20 | 652 |
| PRKDC-19 | + | GUAGGGGCAUUUCCGGGUCC | 20 | 653 |
| PRKDC-20 | + | GUGUGCGUUGCUCCCUGCUG | 20 | 654 |

[0695] Table II.11B provides exemplary targeting domains of gRNAs to be used with an eiCas9 fusion molecule (e.g., an eiCas9 fused to a transcription activator or repressor domain) to alter (e.g., activate or repress) a gene, e.g., PRKDC gene. The targeting domains of gRNAs were selected according to the second tier parameters. The targeting domains bind within 500 bp spanning a transcription start site (TSS), e.g., upstream or downstream of a TSS and have a high level of orthogonality. It is contemplated herein that in an embodiment the targeting domain hybridizes to the target domain through complementary base pairing. Any of the targeting domains in the table can be used with a S. pyogenes eiCas9 fusion molecule (e.g., an eiCas9 fused to a transcription activator or repressor domain) to alter (e.g., activate or repress) the PRKDC gene. One or more gRNA may be used to target an eiCas9 fusion molecule to a region spanning 500 bp of a transcription start site (TSS) of the PRKDC gene.

TABLE II.11B
Exemplary HDR-enhancing gRNAs Targeting a PRKDC
Gene

| | A high level of orthogonality | | | |
|---|---|---|---|---|
| | 11B | | | |
| S. pyogenes | | | Target | |
| 2nd Tier | DNA | | Site | Seq |
| gRNA Name | Strand | Targeting Domain | Length | ID |
| PRKDC-21 | + | AAGAGGCGCGCUUACUGGCC | 20 | 655 |
| PRKDC-22 | − | AAUGCCCCUACGCGCGGAGG | 20 | 656 |
| PRKDC-23 | − | ACUUUCCCGGGGACCCCUGC | 20 | 657 |
| PRKDC-24 | + | AGCCCCGCCUCCGCGCGUAG | 20 | 658 |
| PRKDC-25 | + | AGCGGGACUCGGCGGCAUGG | 20 | 659 |
| PRKDC-26 | − | AUGCCCCUACGCGCGGAGGC | 20 | 660 |
| PRKDC-27 | + | AUUUCCGGGUCCGGGCCGAG | 20 | 661 |
| PRKDC-28 | + | CAGCCCCGCCUCCGCGCGUA | 20 | 662 |
| PRKDC-29 | + | CAUGUUGAUUCGGGCCAAAG | 20 | 663 |
| PRKDC-30 | − | CCCGGAAAUGCCCCUACGCG | 20 | 664 |
| PRKDC-31 | + | CCGCGCGUAGGGGCAUUUCC | 20 | 665 |
| PRKDC-32 | − | CGAAUCAACAUGGAAACCUA | 20 | 666 |
| PRKDC-33 | − | CGCGGCGGCAGGAACUUUCC | 20 | 667 |
| PRKDC-34 | − | CGGCGGCAGGAACUUUCCCG | 20 | 668 |
| PRKDC-35 | + | CGUAGGGGCAUUUCCGGGUC | 20 | 669 |
| PRKDC-36 | + | CUCGGCGGCAUGGCGGGCUC | 20 | 670 |
| PRKDC-37 | − | CUCUUUGGCCCGAAUCAACA | 20 | 671 |
| PRKDC-38 | + | UCCGCGCGUAGGGGCAUUUC | 20 | 672 |
| PRKDC-39 | − | UGCCCCUACGCGCGGAGGCG | 20 | 673 |
| PRKDC-40 | + | UUUCCGGGUCCGGGCCGAGC | 20 | 674 |

[0696] Table II.12A provides exemplary targeting domains of gRNAs to be used with an eiCas9 fusion molecule (e.g., an eiCas9 fused to a transcription activator or repressor domain) to alter (e.g., activate or repress) a gene, e.g., PRKDC gene. The targeting domains of gRNAs were selected according to the first tier parameters. The targeting domains bind within 500 bp spanning a transcription start site (TSS), e.g., upstream or downstream of a TSS, have a high level of orthogonality, start with a 5′G and PAM is NNGRRT. It is contemplated herein that in an embodiment the targeting domain hybridizes to the target domain through complementary base pairing. Any of the targeting domains in the table can be used with a S. aureus eiCas9 fusion molecule (e.g., an eiCas9 fused to a transcription activator or repressor domain) to alter (e.g., activate or repress) the PRKDC gene. One or more gRNA may be used to target an eiCas9 fusion molecule to a region spanning 500 bp of a transcription start site (TSS) of the PRKDC gene.

TABLE II.12A
Exemplary HDR-enhancing gRNAs Targeting a PRKDC
Gene

| | A high level of orthogonality, | | | |
|---|---|---|---|---|
| | starts with a G, PAM is NNGRRT | | | |
| | 12A | | | |
| S. aureus | | | Target | |
| 1st Tier | DNA | | Site | Seq |
| gRNA Name | Strand | Targeting Domain | Length | ID |
| PRKDC-41 | + | GCCUCCGCGCGUAGGGGCAUUU | 22 | 675 |
| PRKDC-42 | − | GGCUCCGGAGCCCGCCAUGCCG | 22 | 676 |

[0697] Table II.12B provides exemplary targeting domains of gRNAs to be used with an eiCas9 fusion molecule (e.g., an eiCas9 fused to a transcription activator or repressor domain) to alter (e.g., activate or repress) a gene, e.g., PRKDC gene. The targeting domains of gRNAs were selected according to the second tier parameters. The targeting domains bind within 500 bp spanning a transcription start site (TSS), e.g., upstream or downstream of a TSS, have a high level of orthogonality and PAM is NNGRRT. It is contemplated herein that in an embodiment the targeting domain hybridizes to the target domain through complementary base pairing. Any of the targeting domains in the table can be used with a S. aureus eiCas9 fusion molecule (e.g., an eiCas9 fused to a transcription activator or repressor domain) to alter (e.g., activate or repress) the PRKDC gene. One or more gRNA may be used to target an eiCas9 fusion molecule to a region spanning 500 bp of a transcription start site (TSS) of the PRKDC gene.

TABLE II.12B
Exemplary HDR-enhancing gRNAs Targeting a PRKDC
Gene

| | A high level of orthogonality, | | | |
|---|---|---|---|---|
| | and PAM is NNGRRT | | | |
| | 12B | | | |
| S. aureus | | | Target | |
| 2nd Tier | DNA | | Site | Seq |
| gRNA Name | Strand | Targeting Domain | Length | ID |
| PRKDC-43 | − | CCAGUAAGCGCGCCUCUUUGGC | 22 | 677 |
| PRKDC-44 | + | CUUACUGGCCAGGCCUUCCCGC | 22 | 678 |

[0698] Table II.13A provides exemplary targeting domains of a gRNAs to be used with an eiCas9 fusion molecule (e.g., an eiCas9 fused to a transcription activator or repressor domain) to alter (e.g., activate or repress) a gene, e.g., LIG4 gene. The targeting domains of gRNAs were selected according to the first tier parameters. The targeting domains bind within 500 bp spanning a transcription start site (TSS), e.g., upstream or downstream of a TSS, have a high level of orthogonality and start with a 5′G. It is contemplated herein that in an embodiment the targeting domain hybridizes to the target domain through complementary base pairing. Any of the targeting domains in the table can be used with a S. pyogenes eiCas9 fusion molecule (e.g., an eiCas9 fused to a transcription activator or repressor domain) to alter (e.g., activate or repress) the LIG4 gene. One or more gRNA may be used to target an eiCas9 fusion molecule to a region spanning 500 bp of a transcription start site (TSS) of the LIG4 gene.

TABLE II.13A
Exemplary HDR-enhancing gRNAs Targeting a LIG4
Gene

| | A high level of orthogonality, | | | |
|---|---|---|---|---|
| | and starts with a G | | | |
| | 13A | | | |
| S. pyogenes | | | Target | |
| 1st Tier | DNA | | Site | Seq |
| gRNA Name | Strand | Targeting Domain | Length | ID |
| LIG4-1 | + | GACGUCAGGUGGGAAGGGUG | 20 | 679 |
| LIG4-2 | − | GCAGCCAGGCUCGCGAUGGG | 20 | 680 |
| LIG4-3 | − | GCAGGCGCAGGGGAGACCCG | 20 | 681 |
| LIG4-4 | − | GCCAGGCUCGCGAUGGGAGG | 20 | 682 |
| LIG4-5 | + | GCCCGGUGACUGCAAGGCCC | 20 | 683 |
| LIG4-6 | − | GCGCAGGCGCAGGGGAGACC | 20 | 684 |
| LIG4-7 | + | GCGCCUGCGCGGCGAGCAGC | 20 | 685 |
| LIG4-8 | − | GCUCGCGAUGGGAGGUGGGG | 20 | 686 |
| LIG4-9 | − | GCUGCUCGCCGCGCAGGCGC | 20 | 687 |
| LIG4-10 | + | GCUUCAGGCUUGACGUCAGG | 20 | 688 |
| LIG4-11 | + | GCUUGAGCCCGGUGACUGCA | 20 | 689 |
| LIG4-12 | − | GGCGCAGCCAGGCUCGCGAU | 20 | 690 |
| LIG4-13 | + | GGCGCCAGCUUCCGGCUUAG | 20 | 691 |
| LIG4-14 | − | GGCUCGCGAUGGGAGGUGGG | 20 | 692 |
| LIG4-15 | + | GGCUUGACGUCAGGUGGGAA | 20 | 693 |
| LIG4-16 | + | GGGGCGGUUGGGAGGUUGGG | 20 | 694 |
| LIG4-17 | + | GGGUCUCCCCUGCGCCUGCG | 20 | 695 |
| LIG4-18 | + | GGUGGCAGGUGGGGGCGGUU | 20 | 696 |
| LIG4-19 | − | GUCACCGGGCUCAAGCACGC | 20 | 697 |
| LIG4-20 | + | GUGGGGGCGGUUGGGAGGUU | 20 | 698 |

[0699] Table II.13B provides exemplary targeting domains of gRNAs to be used with an eiCas9 fusion molecule (e.g., an eiCas9 fused to a transcription activator or repressor domain) to alter (e.g., activate or repress) a gene, e.g., LIG4 gene. The targeting domains of gRNAs were selected according to the second tier parameters. The targeting domains bind within 500 bp spanning a transcription start site (TSS), e.g., upstream or downstream of a TSS and have a high level of orthogonality. It is contemplated herein that in an embodiment the targeting domain hybridizes to the target domain through complementary base pairing. Any of the targeting domains in the table can be used with a S. pyogenes eiCas9 fusion molecule (e.g., an eiCas9 fused to a transcription activator or repressor domain) to alter (e.g., activate or repress) the LIG4 gene. One or more gRNA may be used to target an eiCas9 fusion molecule to a region spanning 500 bp of a transcription start site (TSS) of the LIG4 gene.

TABLE II.13B
Exemplary HDR-enhancing gRNAs
Targeting a LIG4 Gene

| | A high level of orthogonality | | | |
|---|---|---|---|---|
| | 13B | | | |
| S. pyogenes | | | Target | |
| 2nd Tier | DNA | Targeting | Site | Seq |
| gRNA Name | Strand | Domain | Length | ID |
| LIG4-21 | − | ACCCGGGGCCUUGCAGUCAC | 20 | 699 |
| LIG4-22 | + | ACGUCAGGUGGGAAGGGUGU | 20 | 700 |
| LIG4-23 | + | AGGCUUGACGUCAGGUGGGA | 20 | 701 |
| LIG4-24 | − | CAGGCUCGCGAUGGGAGGUG | 20 | 702 |
| LIG4-25 | + | CAUCGCGAGCCUGGCUGCGC | 20 | 703 |
| LIG4-26 | + | CAUCUUCUGGCGCCAGCUUC | 20 | 704 |
| LIG4-27 | − | CCAGGCUCGCGAUGGGAGGU | 20 | 705 |
| LIG4-28 | + | CCCACCUCCCAUCGCGAGCC | 20 | 706 |
| LIG4-29 | − | CCCGGGGCCUUGCAGUCACC | 20 | 707 |
| LIG4-30 | + | CCCGGUGACUGCAAGGCCCC | 20 | 708 |
| LIG4-31 | − | CGCAGGCGCAGGGGAGACCC | 20 | 709 |
| LIG4-32 | + | CGGCGAGCAGCUGGCGGAAC | 20 | 710 |
| LIG4-33 | − | CGGCGCAGCCAGGCUCGCGA | 20 | 711 |
| LIG4-34 | + | CGGCUUAGCGGCUGAGCUUC | 20 | 712 |
| LIG4-35 | − | CUGAAGCUCAGCCGCUAAGC | 20 | 713 |
| LIG4-36 | + | CUGGCGGAACCGGCAUCUUC | 20 | 714 |
| LIG4-37 | − | UCAAGCACGCCGGCGCAGCC | 20 | 715 |
| LIG4-38 | − | UCAGCCGCUAAGCCGGAAGC | 20 | 716 |
| LIG4-39 | + | UGAGCUUCAGGCUUGACGUC | 20 | 717 |
| LIG4-40 | + | UGCGCCGGCGUGCUUGAGCC | 20 | 718 |

[0700] Table II.14A provides exemplary targeting domains of gRNAs to be used with an eiCas9 fusion molecule (e.g., an eiCas9 fused to a transcription activator or repressor domain) to alter (e.g., activate or repress) a gene, e.g., LIG4 gene. The targeting domains of gRNAs were selected according to the first tier parameters. The targeting domains bind within 500 bp spanning a transcription start site (TSS), e.g., upstream or downstream of a TSS, have a high level of orthogonality, start with a 5′G and PAM is NNGRRT. It is contemplated herein that in an embodiment the targeting domain hybridizes to the target domain through complementary base pairing. Any of the targeting domains in the table can be used with a S. aureus eiCas9 fusion molecule (e.g., an eiCas9 fused to a transcription activator or repressor domain) to alter (e.g., activate or repress) the LIG4 gene. One or more gRNA may be used to target an eiCas9 fusion molecule to a region spanning 500 bp of a transcription start site (TSS) of the LIG4 gene.

TABLE II.14A
Exemplary HDR-enhancing gRNA
Targeting a LIG4 Gene

| | A high level of orthogonality, | | | |
|---|---|---|---|---|
| | starts with a G, PAM is NNGRRT | | | |
| | 14A | | | |
| S. aureus | | | Target | |
| 1st Tier | DNA | Targeting | Site | Seq |
| gRNA Name | Strand | Domain | Length | ID |
| LIG4-41 | + | GGUUGGGGGGGGUUGGGGUGGG | 22 | 719 |

[0701] Table II.14B provides exemplary targeting domains of gRNAs to be used with an eiCas9 fusion molecule (e.g., an eiCas9 fused to a transcription activator or repressor domain) to alter (e.g., activate or repress) a gene, e.g., LIG4 gene. The targeting domains of gRNAs were selected according to the second tier parameters. The targeting domains bind within 500 bp spanning a transcription start site (TSS), e.g., upstream or downstream of a TSS, have a high level of orthogonality and PAM is NNGRRT. It is contemplated herein that in an embodiment the targeting domain hybridizes to the target domain through complementary base pairing. Any of the targeting domains in the table can be used with a S. aureus eiCas9 fusion molecule (e.g., an eiCas9 fused to a transcription activator or repressor domain) to alter (e.g., activate or repress) the LIG4 gene. One or more gRNA may be used to target an eiCas9 fusion molecule to a region spanning 500 bp of a transcription start site (TSS) of the LIG4 gene.

TABLE II.14B
Exemplary HDR-enhancing gRNAs Targeting a LIG4 Gene

| S. aureus | A high level of orthogonality, and PAM is NNGRRT | | | |
|---|---|---|---|---|
| 2nd Tier | 14B | | | |
| gRNA | | | Target Site | Seq |
| Name | DNA Strand | Targeting Domain | Length | ID |
| LIG4-42 | + | CGGUUGGGAGGUUGGGGGGGGU | 22 | 720 |
| LIG4-43 | + | UGAGCCCGGUGACUGCAAGGCC | 22 | 721 |
| LIG4-44 | + | UGGGGGCGGUUGGGAGGUUGGG | 22 | 722 |
| LIG4-45 | + | UUCAGGCUUGACGUCAGGUGGG | 22 | 723 |
| LIG4-46 | + | UUGACGUCAGGUGGGAAGGGUG | 22 | 724 |

[0702] Table II.15A provides exemplary targeting domains of gRNAs to be used with an eiCas9 fusion molecule (e.g., an eiCas9 fused to a transcription activator or repressor domain) to alter (e.g., activate or repress) a gene, e.g., XRCC4 gene. The targeting domains of gRNAs were selected according to the first tier parameters. The targeting domains bind within 500 bp spanning a transcription start site (TSS), e.g., upstream or downstream of a TSS, have a high level of orthogonality and start with a 5′G. It is contemplated herein that in an embodiment the targeting domain hybridizes to the target domain through complementary base pairing. Any of the targeting domains in the table can be used with a S. pyogenes eiCas9 fusion molecule (e.g., an eiCas9 fused to a transcription activator or repressor domain) to alter (e.g., activate or repress) the XRCC4 gene. One or more gRNA may be used to target an eiCas9 fusion molecule to a region spanning 500 bp of a transcription start site (TSS) of the XRCC4 gene.

TABLE II.15A
Exemplary HDR-enhancing gRNAs Targeting a XRCC4 Gene

| S. pyogenes | A high level of orthogonality, and starts with a G | | | |
|---|---|---|---|---|
| 1st Tier | 15A | | | |
| gRNA | | | Target Site | Seq |
| Name | DNA Strand | Targeting Domain | Length | ID |
| XRCC4-1 | + | GAAGUAGCUGAUACUCUCAU | 20 | 725 |
| XRCC4-2 | − | GACAAGCCCAACCGGACGGC | 20 | 726 |
| XRCC4-3 | − | GACGGCUGGAGAGGGCGAGA | 20 | 727 |
| XRCC4-4 | − | GAGAGGGCGAGAAGGGCAGA | 20 | 728 |
| XRCC4-5 | + | GAGAGGUAGGAUCCGGAAGU | 20 | 729 |
| XRCC4-6 | + | GAUCACGUCCCGCAGGCCGG | 20 | 730 |
| XRCC4-7 | − | GAUCUAAAUCCCGCCUUUUC | 20 | 731 |
| XRCC4-8 | + | GCACCGCCUACCAAGACGGG | 20 | 732 |
| XRCC4-9 | − | GCCCAACCGGACGGCUGGAG | 20 | 733 |
| XRCC4-10 | + | GCCCUCUCCAGCCGUCCGGU | 20 | 734 |
| XRCC4-11 | + | GCGGGCGUUUUGGAAGAUAC | 20 | 735 |
| XRCC4-12 | + | GGAGAGGUAGGAUCCGGAAG | 20 | 736 |
| XRCC4-13 | + | GGAUUUAGAUCACGUCCCGC | 20 | 737 |
| XRCC4-14 | + | GGCGGUUAAGACACUAGGAU | 20 | 738 |
| XRCC4-15 | − | GGUGCCGUGACAAGCCCAAC | 20 | 739 |

[0703] Table II.15B provides exemplary targeting domains of gRNAs to be used with an eiCas9 fusion molecule (e.g., an eiCas9 fused to a transcription activator or repressor domain) to alter (e.g., activate or repress) a gene, e.g., XRCC4 gene. The targeting domains of gRNAs were selected according to the second tier parameters. The targeting domains bind within 500 bp spanning a transcription start site (TSS), e.g., upstream or downstream of a TSS and have a high level of orthogonality. It is contemplated herein that in an embodiment the targeting domain hybridizes to the target domain through complementary base pairing. Any of the targeting domains in the table can be used with a S. pyogenes eiCas9 fusion molecule (e.g., an eiCas9 fused to a transcription activator or repressor domain) to alter (e.g., activate or repress) the XRCC4 gene. One or more gRNA may be used to target an eiCas9 fusion molecule to a region spanning 500 bp of a transcription start site (TSS) of the XRCC4 gene.

TABLE II.15B
Exemplary HDR-enhancing gRNAs Targeting a XRCC4 Gene

| S. pyogenes | A high level of orthogonality | | | |
|---|---|---|---|---|
| 2nd Tier | 15B | | | |
| gRNA | | | Target Site | Seq |
| Name | DNA Strand | Targeting Domain | Length | ID |
| XRCC4-16 | − | ACGCCCGCUUUCACAGAUCA | 20 | 740 |
| XRCC4-17 | + | ACGGCACCGCCUACCAAGAC | 20 | 741 |
| XRCC4-18 | + | AGACGGGCGGUUAAGACACU | 20 | 742 |
| XRCC4-19 | − | AGAGUAUCAGCUACUUCCGC | 20 | 743 |
| XRCC4-20 | + | AGAUACCGGAAGUAGAGUCA | 20 | 744 |
| XRCC4-21 | − | AGCUACUUCCGCCGGCCUGC | 20 | 745 |
| XRCC4-22 | + | AGUCACGGAGAGGUAGGAUC | 20 | 746 |
| XRCC4-23 | − | AGUGUCUUAACCGCCCGUCU | 20 | 747 |
| XRCC4-24 | + | AUCUGUGAAAGCGGGCGUUU | 20 | 748 |
| XRCC4-25 | + | CACGGCACCGCCUACCAAGA | 20 | 749 |
| XRCC4-26 | − | CCCAACCGGACGGCUGGAGA | 20 | 750 |
| XRCC4-27 | + | CCCUCUCCAGCCGUCCGGUU | 20 | 751 |
| XRCC4-28 | + | CCGGAAGUAGAGUCACGGAG | 20 | 752 |
| XRCC4-29 | + | CCGUCCGGUUGGGCUUGUCA | 20 | 753 |
| XRCC4-30 | − | CCGUGACAAGCCCAACCGGA | 20 | 754 |
| XRCC4-31 | − | CUAAAUCCCGCCUUUUCCGG | 20 | 755 |
| XRCC4-32 | − | UAACCGCCCGUCUUGGUAGG | 20 | 756 |
| XRCC4-33 | − | UCCCGCCUUUUCCGGUGGAG | 20 | 757 |
| XRCC4-34 | − | UCUUAACCGCCCGUCUUGGU | 20 | 758 |
| XRCC4-35 | + | UUAGAUCACGUCCCGCAGGC | 20 | 759 |

[0704] Table II.16A provides exemplary targeting domains of gRNAs to be used with an eiCas9 fusion molecule (e.g., an eiCas9 fused to a transcription activator or repressor domain) to alter (e.g., activate or repress) a gene, e.g., XRCC4 gene. The targeting domains of gRNAs were selected according to the first tier parameters. The targeting domains bind within 500 bp spanning a transcription start site (TSS), e.g., upstream or downstream of a TSS, have a high level of orthogonality, start with a 5′G and PAM is NNGRRT. It is contemplated herein that in an embodiment the targeting domain hybridizes to the target domain through complementary base pairing. Any of the targeting domains in the table can be used with a S. aureus eiCas9 fusion molecule (e.g., an eiCas9 fused to a transcription activator or repressor domain) to alter (e.g., activate or repress) the XRCC4 gene. One or more gRNA may be used to target an eiCas9 fusion molecule to a region spanning 500 bp of a transcription start site (TSS) of the XRCC4 gene.

TABLE II.16A
Exemplary HDR-enhancing gRNAs Targeting a XRCC4 Gene

| S. aureus | A high level of orthogonality, starts with a G, PAM is NNGRRT | | | |
|---|---|---|---|---|
| 1st Tier | 16A | | | |
| gRNA | | | Target Site | |
| Name | DNA Strand | Targeting Domain | Length | Seq ID |
| XRCC4-36 | + | GCGUUUUGGAAGAUACCGGAAG | 22 | 760 |
| XRCC4-37 | + | GGCUCCUCUCCACCGGAAAAGG | 22 | 761 |

[0705] Table II.16B provides exemplary targeting domains of gRNAs to be used with an eiCas9 fusion molecule (e.g., an eiCas9 fused to a transcription activator or repressor domain) to alter (e.g., activate or repress) a gene, e.g., XRCC4 gene. The targeting domains of gRNAs were selected according to the second tier parameters. The targeting domains bind within 500 bp spanning a transcription start site (TSS), e.g., upstream or downstream of a TSS, have a high level of orthogonality and PAM is NNGRRT. It is contemplated herein that in an embodiment the targeting domain hybridizes to the target domain through complementary base pairing. Any of the targeting domains in the table can be used with a S. aureus eiCas9 fusion molecule (e.g., an eiCas9 fused to a transcription activator or repressor domain) to alter (e.g., activate or repress) the XRCC4 gene. One or more gRNA may be used to target an eiCas9 fusion molecule to a region spanning 500 bp of a transcription start site (TSS) of the XRCC4 gene.

TABLE II.16B
Exemplary HDR-enhancing gRNAs Targeting a XRCC4 Gene

| S. aureus | A high level of orthogonality, and PAM is NNGRRT | | | |
|---|---|---|---|---|
| 2nd Tier | 16B | | | |
| gRNA | | | Target Site | Seq |
| Name | DNA Strand | Targeting Domain | Length | ID |
| XRCC4-38 | − | AGAUCAAGGUUUUGCAACCAAU | 22 | 762 |
| XRCC4-39 | − | AUUUAAAGAGGCAGCCCCACUU | 22 | 763 |
| XRCC4-40 | + | CCAAGACGGGCGGUUAAGACAC | 22 | 764 |
| XRCC4-41 | + | CGGAAGUAGAGUCACGGAGAGG | 22 | 765 |

[0706] Table II.17A provides exemplary targeting domains of gRNAs to be used with an eiCas9 fusion molecule (e.g., an eiCas9 fused to a transcription activator or repressor domain) to alter (e.g., activate or repress) a gene, e.g., NHEJ1 gene. The targeting domains of gRNAs were selected according to the first tier parameters. The targeting domains bind within 500 bp spanning a transcription start site (TSS), e.g., upstream or downstream of a TSS, have a high level of orthogonality and start with a 5′G. It is contemplated herein that in an embodiment the targeting domain hybridizes to the target domain through complementary base pairing. Any of the targeting domains in the table can be used with a S. pyogenes eiCas9 fusion molecule (e.g., an eiCas9 fused to a transcription activator or repressor domain) to alter (e.g., activate or repress) the NHEJ1 gene. One or more gRNA may be used to target an eiCas9 fusion molecule to a region spanning 500 bp of a transcription start site (TSS) of the NHEJ1 gene.

TABLE II.17A
Exemplary HDR-enhancing gRNAs Targeting a NHEJ1 Gene

| S. pyogenes | A high level of orthogonality, and starts with a G | | | |
|---|---|---|---|---|
| 1st Tier | 17A | | | |
| gRNA | | | Target Site | Seq |
| Name | DNA Strand | Targeting Domain | Length | ID |
| NHEJ1-1 | + | GCAGUCCGCUGGCUGCUGCC | 20 | 766 |
| NHEJ1-2 | − | GCCAGCGGACUGCGCACGCG | 20 | 767 |
| NHEJ1-3 | − | GCCCGCUCGCGCAAACCGAA | 20 | 768 |
| NHEJ1-4 | + | GCCUUUCGGUUUGCGCGAGC | 20 | 769 |
| NHEJ1-5 | + | GCGACGAAGCCGCUGGUGGC | 20 | 770 |
| NHEJ1-6 | − | GCGAUUCCACCUACCGUCAG | 20 | 771 |
| NHEJ1-7 | − | GCGCUCCCUCCAGGGAGAAA | 20 | 772 |
| NHEJ1-8 | − | GCGGCUUCGUCGCACCAAAC | 20 | 773 |
| NHEJ1-9 | − | GCGUCUGAGCAGCCCCUCGC | 20 | 774 |
| NHEJ1-10 | + | GCUCGAGUGAAGGUACUCGU | 20 | 775 |
| NHEJ1-11 | + | GCUGCCCGGCGUGGAUGGUA | 20 | 776 |
| NHEJ1-12 | + | GCUGCUCAGACGCUGCGGGU | 20 | 777 |
| NHEJ1-13 | − | GGCCUAUGCCUGGCGUGGGC | 20 | 778 |
| NHEJ1-14 | + | GGCCUUUCGGUUUGCGCGAG | 20 | 779 |
| NHEJ1-15 | + | GGCGCUCUCGCGGCCGCUGA | 20 | 780 |
| NHEJ1-16 | − | GGUCUUGGGAUACAGGGGCG | 20 | 781 |
| NHEJ1-17 | + | GGUGGAAUCGCGUUCGAGUC | 20 | 782 |
| NHEJ1-18 | + | GUGCGUGCGGCUAAGAGAGU | 20 | 783 |
| NHEJ1-19 | + | GUGGAAUCGCGUUCGAGUCC | 20 | 784 |
| NHEJ1-20 | + | GUUUGGUGCGACGAAGCCGC | 20 | 785 |

[0707] Table II.17B provides exemplary targeting domains of gRNAs to be used with an eiCas9 fusion molecule (e.g., an eiCas9 fused to a transcription activator or repressor domain) to alter (e.g., activate or repress) a gene, e.g., NHEJ1 gene. The targeting domains of gRNAs were selected according to the second tier parameters. The targeting domains bind within 500 bp spanning a transcription start site (TSS), e.g., upstream or downstream of a TSS and have a high level of orthogonality. It is contemplated herein that in an embodiment the targeting domain hybridizes to the target domain through complementary base pairing. Any of the targeting domains in the table can be used with a S. pyogenes eiCas9 fusion molecule (e.g., an eiCas9 fused to a transcription activator or repressor domain) to alter (e.g., activate or repress) the NHEJ1 gene. One or more gRNA may be used to target an eiCas9 fusion molecule to a region spanning 500 bp of a transcription start site TS S) of the NHEJ1 gene.

TABLE II.17B
Exemplary HDR-enhancing gRNAs Targeting a NHEJ1 Gene

| S. pyogenes | A high level of orthogonality | | | |
|---|---|---|---|---|
| 2nd Tier | 17B | | | |
| gRNA | | | Target Site | Seq |
| Name | DNA Strand | Targeting Domain | Length | ID |
| NHEJ1-21 | + | AAUCGCGUUCGAGUCCGGGC | 20 | 786 |
| NHEJ1-22 | + | ACCCUGCCUCCUCUUGCGGU | 20 | 787 |
| NHEJ1-23 | − | ACCGAAAGGCCUAGAGUAAG | 20 | 788 |
| NHEJ1-24 | + | CAGACGCUGCGGGUUGGCCC | 20 | 789 |
| NHEJ1-25 | − | CGAGCCCUACCAUCCACGCC | 20 | 790 |
| NHEJ1-26 | + | CGCUGGCCUUUUCUCCCUGG | 20 | 791 |
| NHEJ1-27 | − | CGCUUUCCCCCCACCGCAAG | 20 | 792 |
| NHEJ1-28 | + | CGGGCAGGAAAGCGUGCGUG | 20 | 793 |
| NHEJ1-29 | + | CGUGCGUGCGGCUAAGAGAG | 20 | 794 |
| NHEJ1-30 | + | CUCCACUUACCCUGGCCACU | 20 | 795 |
| NHEJ1-31 | + | CUGCCUCCUCUUGCGGUGGG | 20 | 796 |
| NHEJ1-32 | + | CUGCGGGUUGGCCCUGGCGC | 20 | 797 |
| NHEJ1-33 | + | UAAGAGAGUGGGCGCUCUCG | 20 | 798 |
| NHEJ1-34 | − | UCGAGCCCUACCAUCCACGC | 20 | 799 |
| NHEJ1-35 | + | UCGCGGCCGCUGACGGUAGG | 20 | 800 |
| NHEJ1-36 | + | UGCUGCCCGGCGUGGAUGGU | 20 | 801 |
| NHEJ1-37 | + | UGGAGGGAGCGCGCGCUGCC | 20 | 802 |
| NHEJ1-38 | + | UGGUGCGACGAAGCCGCUGG | 20 | 803 |
| NHEJ1-39 | + | UUCGGUUUGCGCGAGCGGGC | 20 | 804 |
| NHEJ1-40 | − | UUUCCCCCCACCGCAAGAGG | 20 | 805 |

[0708] Table II.18A provides exemplary targeting domains of gRNAs to be used with an eiCas9 fusion molecule (e.g., an eiCas9 fused to a transcription activator or repressor domain) to alter (e.g., activate or repress) a gene, e.g., NHEJ1 gene. The targeting domains of gRNAs were selected according to the first tier parameters. The targeting domains bind within 500 bp spanning a transcription start site (TSS), e.g., upstream or downstream of a TSS, have a high level of orthogonality, start with a 5′G and PAM is NNGRRT. It is contemplated herein that in an embodiment the targeting domain hybridizes to the target domain through complementary base pairing. Any of the targeting domains in the table can be used with a S. aureus eiCas9 fusion molecule (e.g., an eiCas9 fused to a transcription activator or repressor domain) to alter (e.g., activate or repress) the NHEJ1 gene. One or more gRNA may be used to target an eiCas9 fusion molecule to a region spanning 500 bp of a transcription start site TS S) of the NHEJ1 gene.

TABLE II.18A
Exemplary HDR-enhancing gRNAs Targeting a NHEJ1 Gene

| S. aureus | A high level of orthogonality, starts with a G, PAM is NNGRRT | | | |
|---|---|---|---|---|
| 1st Tier | 18A | | | |
| gRNA | | | Target Site | |
| Name | DNA Strand | Targeting Domain | Length | Seq ID |
| NHEJ1-41 | + | GUCCAGGGCAGGCCUCCGGGGG | 22 | 806 |

[0709] Table II.18B provides exemplary targeting domains of gRNAs to be used with an eiCas9 fusion molecule (e.g., an eiCas9 fused to a transcription activator or repressor domain) to alter (e.g., activate or repress) a gene, e.g., NHEJ1 gene. The targeting domains of gRNAs were selected according to the second tier parameters. The targeting domains bind within 500 bp spanning a transcription start site (TSS), e.g., upstream or downstream of a TSS, have a high level of orthogonality and PAM is NNGRRT. It is contemplated herein that in an embodiment the targeting domain hybridizes to the target domain through complementary base pairing. Any of the targeting domains in the table can be used with a S. aureus eiCas9 fusion molecule (e.g., an eiCas9 fused to a transcription activator or repressor domain) to alter (e.g., activate or repress) the NHEJ1 gene. One or more gRNA may be used to target an eiCas9 fusion molecule to a region spanning 500 bp of a transcription start site (TSS) of the NHEJ1 gene.

TABLE II.18B
Exemplary HDR-enhancing gRNAs Targeting a NHEJ1 Gene

| S. aureus | A high level of orthogonality, and PAM is NNGRRT | | | |
|---|---|---|---|---|
| 2nd Tier | 18B | | | |
| gRNA | | | Target Site | Seq |
| Name | DNA Strand | Targeting Domain | Length | ID |
| NHEJ1-42 | − | ACCGCAAGAGGAGGCAGGGUCU | 22 | 807 |
| NHEJ1-43 | + | AGCGAGGGGCUGCUCAGACGCU | 22 | 808 |
| NHEJ1-44 | + | AGGAAAGCGUGCGUGCGGCUAA | 22 | 809 |
| NHEJ1-45 | + | AGUCCGCUGGCUGCUGCCCGGC | 22 | 810 |
| NHEJ1-46 | − | AUGAGAGGAGCGCCCCAGUGGC | 22 | 811 |
| NHEJ1-47 | + | CCCUGGAGGGAGCGCGCGCUGC | 22 | 812 |
| NHEJ1-48 | − | CGCUCGCGCAAACCGAAAGGCC | 22 | 813 |
| NHEJ1-49 | − | CGUCGCACCAAACAGGCGACCA | 22 | 814 |
| NHEJ1-50 | + | CUGACGGUAGGUGGAAUCGCGU | 22 | 815 |
| NHEJ1-51 | + | UCUCGCGGCCGCUGACGGUAGG | 22 | 816 |
| NHEJ1-52 | + | UGCCCGGCGUGGAUGGUAGGGC | 22 | 817 |
| NHEJ1-53 | − | UUCCCCCCACCGCAAGAGGAGG | 22 | 818 |

[0710] Table II.19A provides exemplary targeting domains of gRNAs to be used with an eiCas9 fusion molecule (e.g., an eiCas9 fused to a transcription activator or repressor domain) to alter (e.g., activate or repress) a gene, e.g., DCLRE1C gene. The targeting domains of gRNAs were selected according to the first tier parameters. The targeting domains bind within 500 bp spanning a transcription start site (TSS), e.g., upstream or downstream of a TSS, have a high level of orthogonality and start with a 5′G. It is contemplated herein that in an embodiment the targeting domain hybridizes to the target domain through complementary base pairing. Any of the targeting domains in the table can be used with a S. pyogenes eiCas9 fusion molecule (e.g., an eiCas9 fused to a transcription activator or repressor domain) to alter (e.g., activate or repress) the DCLRE8C gene. One or more gRNA may be used to target an eiCas9 fusion molecule to a region spanning 500 bp of a transcription start site (TSS) of the DCLRE1C gene.

TABLE II.19A
Exemplary HDR-enhancing gRNAs Targeting a DCLRE1C Gene

| S. pyogenes | A high level of orthogonality, and starts with a G | | | |
|---|---|---|---|---|
| 1st Tier | 19A | | | |
| gRNA | | | Target Site | Seq |
| Name | DNA Strand | Targeting Domain | Length | ID |
| DCLRE1C-1 | + | GAGUUCUUUCGAGGGGCAGA | 20 | 819 |
| DCLRE1C-2 | − | GCCGCGCGCUGCCUCGCCAU | 20 | 820 |
| DCLRE1C-3 | − | GCGCCGCCGAUCCCAGAGUC | 20 | 821 |
| DCLRE1C-4 | + | GCGCGGCUUCCCGGAAGUGG | 20 | 822 |
| DCLRE1C-5 | + | GCGCUAUGAGUUCUUUCGAG | 20 | 823 |
| DCLRE1C-6 | + | GCGGGCGCCUAGAACCCGAC | 20 | 824 |
| DCLRE1C-7 | + | GCUUCCCGGAAGUGGCGGCG | 20 | 825 |
| DCLRE1C-8 | + | GCUUCGAUAGGGAGAACCUG | 20 | 826 |
| DCLRE1C-9 | − | GGAAGUAGGCGCGGGCCCUC | 20 | 827 |
| DCLRE1C-10 | − | GGAGACCGGGGGCAAAGUCA | 20 | 828 |
| DCLRE1C-11 | − | GGAGCAUCCGGUCGGGUUCU | 20 | 829 |
| DCLRE1C-12 | + | GGCGCGGUCAGGGCUGGCCU | 20 | 830 |
| DCLRE1C-13 | + | GGCGCUAUGAGUUCUUUCGA | 20 | 831 |
| DCLRE1C-14 | + | GGCUGCGUUCGGCCGCCCAA | 20 | 832 |
| DCLRE1C-15 | − | GGGCAAAGUCAAGGAGCAUC | 20 | 833 |
| DCLRE1C-16 | + | GGGGUCCCGGACUCUGGGAU | 20 | 834 |
| DCLRE1C-17 | + | GGUCUCCGGACUCCUCUGAU | 20 | 835 |
| DCLRE1C-18 | + | GGUUUUGGGGUCCCGGACUC | 20 | 836 |
| DCLRE1C-19 | + | GUCCCGGACUCUGGGAUCGG | 20 | 837 |
| DCLRE1C-20 | + | GUUUUGGGGUCCCGGACUCU | 20 | 838 |

[0711] Table II.19B provides exemplary targeting domains of gRNAs to be used with an eiCas9 fusion molecule (e.g., an eiCas9 fused to a transcription activator or repressor domain) to alter (e.g., activate or repress) a gene, e.g., DCLRE1C gene. The targeting domains of gRNAs were selected according to the second tier parameters. The targeting domains bind within 500 bp spanning a transcription start site (TSS), e.g., upstream or downstream of a TSS and have a high level of orthogonality. It is contemplated herein that in an embodiment the targeting domain hybridizes to the target domain through complementary base pairing. Any of the targeting domains in the table can be used with a S. pyogenes eiCas9 fusion molecule (e.g., an eiCas9 fused to a transcription activator or repressor domain) to alter (e.g., activate or repress) the DCLRE1C gene. One or more gRNA may be used to target an eiCas9 fusion molecule to a region spanning 500 bp of a transcription start site (TSS) of the DCLRE1C gene.

TABLE II.19B
Exemplary HDR-enhancing gRNAs Targeting a DCLRE1C Gene

| S. pyogenes | A high level of orthogonality | | | |
|---|---|---|---|---|
| 2nd Tier | 19B | | | |
| gRNA | | | Target Site | Seq |
| Name | DNA Strand | Targeting Domain | Length | ID |
| DCLRE1C-21 | − | AAGCGGUCUAUGGAGAUAGU | 20 | 839 |
| DCLRE1C-22 | − | ACGCAGCCACGUCCAAUCAG | 20 | 840 |
| DCLRE1C-23 | + | AGCGCGCGGCUUCCCGGAAG | 20 | 841 |
| DCLRE1C-24 | − | AUCAGAGGAGUCCGGAGACC | 20 | 842 |
| DCLRE1C-25 | − | CACGUCCAAUCAGAGGAGUC | 20 | 843 |
| DCLRE1C-26 | + | CCCAAUGGCGAGGCAGCGCG | 20 | 844 |
| DCLRE1C-27 | − | CCGCGCGCUGCCUCGCCAUU | 20 | 845 |
| DCLRE1C-28 | − | CCUGACCGCGCCGCCACUUC | 20 | 846 |
| DCLRE1C-29 | − | CGCCGCCGAUCCCAGAGUCC | 20 | 847 |
| DCLRE1C-30 | + | CGGAAGUGGCGGCGCGGUCA | 20 | 848 |
| DCLRE1C-31 | + | CGGACUCCUCUGAUUGGACG | 20 | 849 |
| DCLRE1C-32 | + | CGGCGCUAUGAGUUCUUUCG | 20 | 850 |
| DCLRE1C-33 | + | CGUUCGGCCGCCCAAUGGCG | 20 | 851 |
| DCLRE1C-34 | + | CUCCAUAGACCGCUUCGAUA | 20 | 852 |
| DCLRE1C-35 | − | CUCCCUAUCGAAGCGGUCUA | 20 | 853 |
| DCLRE1C-36 | − | CUGACCGCGCCGCCACUUCC | 20 | 854 |
| DCLRE1C-37 | + | CUUCGAUAGGGAGAACCUGA | 20 | 855 |
| DCLRE1C-38 | − | UCAGAGGAGUCCGGAGACCG | 20 | 856 |
| DCLRE1C-39 | + | UCUCCAUAGACCGCUUCGAU | 20 | 857 |
| DCLRE1C-40 | + | UGAUUGGACGUGGCUGCGUU | 20 | 858 |

[0712] Table II.20A provides exemplary targeting domains of gRNAs to be used with an eiCas9 fusion molecule (e.g., an eiCas9 fused to a transcription activator or repressor domain) to alter (e.g., activate or repress) a gene, e.g., DCLRElC gene. The targeting domains of gRNAs were selected according to the first tier parameters. The targeting domains bind within 500 bp spanning a transcription start site (TSS), e.g., upstream or downstream of a TSS, have a high level of orthogonality, start with a 5′G and PAM is NNGRRT. It is contemplated herein that in an embodiment the targeting domain hybridizes to the target domain through complementary base pairing. Any of the targeting domains in the table can be used with a S. aureus eiCas9 fusion molecule (e.g., an eiCas9 fused to a transcription activator or repressor domain) to alter (e.g., activate or repress) the DCLRElC gene. One or more gRNA may be used to target an eiCas9 fusion molecule to a region spanning 500 bp of a transcription start site (TSS) of the DCLRElC gene.

TABLE II.20A
Exemplary HDR-enhancing gRNAs Targeting a DCLRE1C Gene

| S. aureus | A high level of orthogonality, starts with a G, PAM is NNGRRT | | | |
|---|---|---|---|---|
| 1st Tier | 20A | | | |
| gRNA | | | Target Site | Seq |
| Name | DNA Strand | Targeting Domain | Length | ID |
| DCLRE1C-41 | − | GAACGCAGCCACGUCCAAUCAG | 22 | 859 |
| DCLRE1C-42 | − | GAACUCAUAGCGCCGCCGAUCC | 22 | 860 |
| DCLRE1C-43 | + | GCAGCGGGCGCCUAGAACCCGA | 22 | 861 |
| DCLRE1C-44 | + | GCCUUGGCUUCAGCUGCGGUUU | 22 | 862 |
| DCLRE1C-45 | + | GCGGUUUUGGGGUCCCGGACUC | 22 | 863 |
| DCLRE1C-46 | + | GGACUCUGGGAUCGGCGGCGCU | 22 | 864 |
| DCLRE1C-47 | − | GGCAAAGUCAAGGAGCAUCCGG | 22 | 865 |

[0713] Table II.20B provides exemplary targeting domains of gRNAs to be used with an eiCas9 fusion molecule (e.g., an eiCas9 fused to a transcription activator or repressor domain) to alter (e.g., activate or repress) a gene, e.g., DCLRElC gene. The targeting domains of gRNAs were selected according to the second tier parameters. The targeting domains bind within 500 bp spanning a transcription start site (TSS), e.g., upstream or downstream of a TSS, have a high level of orthogonality and PAM is NNGRRT. It is contemplated herein that in an embodiment the targeting domain hybridizes to the target domain through complementary base pairing. Any of the targeting domains in the table can be used with a S. aureus eiCas9 fusion molecule (e.g., an eiCas9 fused to a transcription activator or repressor domain) to alter (e.g., activate or repress) the DCLRE1C gene. One or more gRNA may be used to target an eiCas9 fusion molecule to a region spanning 500 bp of a transcription start site (TSS) of the DCLRE1C gene.

TABLE II.20B
Exemplary HDR-enhancing gRNAs Targeting a DCLRE1C Gene

| S. aureus | A high level of orthogonality, and PAM is NNGRRT | | | |
|---|---|---|---|---|
| 2nd Tier | 20B | | | |
| gRNA | | | Target Site | Seq |
| Name | DNA Strand | Targeting Domain | Length | ID |
| DCLRE1C-48 | + | AGUUCUUUCGAGGGGCAGAUGG | 22 | 866 |
| DCLRE1C-49 | − | UCGAAGCGGUCUAUGGAGAUAG | 22 | 867 |

[0714] Table II.21A provides exemplary targeting domains of gRNAs to be used with an eiCas9 fusion molecule (e.g., an eiCas9 fused to a transcription activator or repressor domain) to alter (e.g., activate or repress) a gene, e.g., BRCA2 gene. The targeting domains of gRNAs were selected according to the first tier parameters. The targeting domains bind within 500 bp spanning a transcription start site (TSS), e.g., upstream or downstream of a TSS, have a high level of orthogonality and start with a 5′G. It is contemplated herein that in an embodiment the targeting domain hybridizes to the target domain through complementary base pairing. Any of the targeting domains in the table can be used with a S. pyogenes eiCas9 fusion molecule (e.g., an eiCas9 fused to a transcription activator or repressor domain) to alter (e.g., activate or repress) the BRCA2 gene. One or more gRNA may be used to target an eiCas9 fusion molecule to a region spanning 500 bp of a transcription start site (TSS) of the BRCA2 gene.

TABLE II.21A
Exemplary HDR-enhancing gRNAs Targeting a BRCA2 Gene

| S. pyogenes | A high level of orthogonality, and starts with a G | | | |
|---|---|---|---|---|
| 1st Tier | 21A | | | |
| gRNA | | | Target Site | Seq |
| Name | DNA Strand | Targeting Domain | Length | ID |
| BRCA2-1 | + | GACGGUUGGGAUGCCUGACA | 20 | 868 |
| BRCA2-2 | − | GAGGCGCAGCAGUGCCACAG | 20 | 869 |
| BRCA2-3 | + | GCCCACCCAGGCCUGACUUC | 20 | 870 |
| BRCA2-4 | + | GCCUCGGGUGUCUUUUGCGG | 20 | 871 |
| BRCA2-5 | − | GCGAAAGGAAAUUCCUUGUC | 20 | 872 |
| BRCA2-6 | + | GCUGCGCCUCUGCUGCGCCU | 20 | 873 |
| BRCA2-7 | − | GCUGCGGGUAUUUCUCAGUG | 20 | 874 |
| BRCA2-8 | − | GUAUUUCUCAGUGUGGCGAA | 20 | 875 |
| BRCA2-9 | + | GUGUGCUGCGUGUCGCGUCA | 20 | 876 |

[0715] Table II.21B provides exemplary targeting domains of gRNAs to be used with an eiCas9 fusion molecule (e.g., an eiCas9 fused to a transcription activator or repressor domain) to alter (e.g., activate or repress) a gene, e.g., BRCA2 gene. The targeting domains of gRNAs were selected according to the second tier parameters. The targeting domains bind within 500 bp spanning a transcription start site (TSS), e.g., upstream or downstream of a TSS and have a high level of orthogonality. It is contemplated herein that in an embodiment the targeting domain hybridizes to the target domain through complementary base pairing. Any of the targeting domains in the table can be used with a S. pyogenes eiCas9 fusion molecule (e.g., an eiCas9 fused to a transcription activator or repressor domain) to alter (e.g., activate or repress) the BRCA2 gene. One or more gRNA may be used to target an eiCas9 fusion molecule to a region spanning 500 bp of a transcription start site (TSS) of the BRCA2 gene.

TABLE II.21B
Exemplary HDR-enhancing gRNAs Targeting a BRCA2 Gene

| S. pyogenes | A high level of orthogonality | | | |
|---|---|---|---|---|
| 2nd Tier | 21B | | | |
| gRNA | | | Target Site | Seq |
| Name | DNA Strand | Targeting Domain | Length | ID |
| BRCA2-10 | − | ACACGCACCACCCGGAAGUC | 20 | 877 |
| BRCA2-11 | + | ACACUGAGAAAUACCCGCAG | 20 | 878 |
| BRCA2-12 | − | ACCACCCGGAAGUCAGGCCU | 20 | 879 |
| BRCA2-13 | + | ACCCAGGCCUGACUUCCGGG | 20 | 880 |
| BRCA2-14 | − | ACCGCCGCAAAAGACACCCG | 20 | 881 |
| BRCA2-15 | + | ACGGCGUCACGUGGCCAGCG | 20 | 882 |
| BRCA2-16 | + | ACGUGGCCAGCGCGGGCUUG | 20 | 883 |
| BRCA2-17 | + | AUACCCGCAGCGGCCCACCC | 20 | 884 |
| BRCA2-18 | − | CACCACCCGGAAGUCAGGCC | 20 | 885 |
| BRCA2-19 | − | CCCGGAAGUCAGGCCUGGGU | 20 | 886 |
| BRCA2-20 | + | CGCGAGCUUCUGAAACUAGG | 20 | 887 |
| BRCA2-21 | + | CGGCAGAGGCGGAGCCGCUG | 20 | 888 |
| BRCA2-22 | + | CGGCGUCACGUGGCCAGCGC | 20 | 889 |
| BRCA2-23 | + | CGGGUGUCUUUUGCGGCGGU | 20 | 890 |
| BRCA2-24 | − | CUCGCGCCACAAGCCCGCGC | 20 | 891 |
| BRCA2-25 | + | CUUCUGAAACUAGGCGGCAG | 20 | 892 |
| BRCA2-26 | + | UCGGGUGUCUUUUGCGGCGG | 20 | 893 |
| BRCA2-27 | + | UGCGCCUCGGGUGUCUUUUG | 20 | 894 |
| BRCA2-28 | + | UGGCGCGAGCUUCUGAAACU | 20 | 895 |
| BRCA2-29 | + | UGUCGCGUCACGGCGUCACG | 20 | 896 |

[0716] Table II.22A provides exemplary targeting domains of gRNAs to be used with an eiCas9 fusion molecule (e.g., an eiCas9 fused to a transcription activator or repressor domain) to alter (e.g., activate or repress) a gene, e.g., BRCA2 gene. The targeting domains of gRNAs were selected according to the first tier parameters. The targeting domains bind within 500 bp spanning a transcription start site (TSS), e.g., upstream or downstream of a TSS, have a high level of orthogonality, start with a 5′G and PAM is NNGRRT. It is contemplated herein that in an embodiment the targeting domain hybridizes to the target domain through complementary base pairing. Any of the targeting domains in the table can be used with a S. aureus eiCas9 fusion molecule (e.g., an eiCas9 fused to a transcription activator or repressor domain) to alter (e.g., activate or repress) the BRCA2 gene. One or more gRNA may be used to target an eiCas9 fusion molecule to a region spanning 500 bp of a transcription start site (TSS) of the BRCA2 gene.

TABLE II.22A
Exemplary HDR-enhancing gRNAs Targeting a BRCA2 Gene

| S. aureus | A high level of orthogonality, starts with a G, PAM is NNGRRT | | | |
|---|---|---|---|---|
| 1st Tier | 22A | | | |
| gRNA | | | Target Site | |
| Name | DNA Strand | Targeting Domain | Length | Seq ID |
| BRCA2-30 | + | GCCUCGGGUGUCUUUUGCGGCG | 22 | 897 |
| BRCA2-31 | + | GCGGCCCACCCAGGCCUGACUU | 22 | 898 |

[0717] Table II.22B provides exemplary targeting domains of gRNAs to be used with an eiCas9 fusion molecule (e.g., an eiCas9 fused to a transcription activator or repressor domain) to alter (e.g., activate or repress) a gene, e.g., BRCA2 gene. The targeting domains of gRNAs were selected according to the second tier parameters. The targeting domains bind within 500 bp spanning a transcription start site (TSS), e.g., upstream or downstream of a TSS, have a high level of orthogonality and PAM is NNGRRT. It is contemplated herein that in an embodiment the targeting domain hybridizes to the target domain through complementary base pairing. Any of the targeting domains in the table can be used with a S. aureus eiCas9 fusion molecule (e.g., an eiCas9 fused to a transcription activator or repressor domain) to alter (e.g., activate or repress) the BRCA2 gene. One or more gRNA may be used to target an eiCas9 fusion molecule to a region spanning 500 bp of a transcription start site (TSS) of the BRCA2 gene.

TABLE II.22B
Exemplary HDR-enhancing gRNAs Targeting a BRCA2 Gene

| S. aureus | A high level of orthogonality, and PAM is NNGRRT | | | |
|---|---|---|---|---|
| 2nd Tier | 22B | | | |
| gRNA | | | Target Site | Seq |
| Name | DNA Strand | Targeting Domain | Length | ID |
| BRCA2-32 | − | ACGCACCACCCGGAAGUCAGGC | 22 | 899 |
| BRCA2-33 | + | ACUGCUGCGCCUCUGCUGCGCC | 22 | 900 |
| BRCA2-34 | − | AGUCAGGCCUGGGUGGGCCGCU | 22 | 901 |
| BRCA2-35 | + | CUGACGGUUGGGAUGCCUGACA | 22 | 902 |

[0718] Table II.23A provides exemplary targeting domains of gRNAs to be used with an eiCas9 fusion molecule (e.g., an eiCas9 fused to a transcription activator or repressor domain) to alter (e.g., activate or repress) a gene, e.g., RAD51 gene. The targeting domains of gRNAs were selected according to the first tier parameters. The targeting domains bind within 500 bp spanning a transcription start site (TSS), e.g., upstream or downstream of a TSS, have a high level of orthogonality and start with a 5′G. It is contemplated herein that in an embodiment the targeting domain hybridizes to the target domain through complementary base pairing. Any of the targeting domains in the table can be used with a S. pyogenes eiCas9 fusion molecule (e.g., an eiCas9 fused to a transcription activator or repressor domain) to alter (e.g., activate or repress) the RAD51 gene. One or more gRNA may be used to target an eiCas9 fusion molecule to a region spanning 500 bp of a transcription start site (TSS) of the RAD51 gene.

TABLE II.23A
Exemplary HDR-enhancing gRNAs Targeting a RAD51 Gene

| S. pyogenes | A high level of orthogonality, and starts with a G | | | |
|---|---|---|---|---|
| 1st Tier | 23A | | | |
| gRNA | | | Target Site | Seq |
| Name | DNA Strand | Targeting Domain | Length | ID |
| RAD51-1 | − | GAAGCGCCGCACUCUCCUUA | 20 | 903 |
| RAD51-2 | + | GAAGGCGGAUCCGGGAGGCG | 20 | 904 |
| RAD51-3 | + | GAGAAGGCGGAUCCGGGAGG | 20 | 905 |
| RAD51-4 | + | GCAGGGCGGAAGCGGGGAGA | 20 | 906 |
| RAD51-5 | − | GCCGCACUCUCCUUAGGGCU | 20 | 907 |
| RAD51-6 | + | GCGGGAAUUCUGAAAGCCGC | 20 | 908 |
| RAD51-7 | + | GCUGGGAACUGCAACUCAUC | 20 | 909 |
| RAD51-8 | + | GCUUCCCGAGGCGUGCAGCU | 20 | 910 |
| RAD51-9 | − | GGAAGCGCCGCACUCUCCUU | 20 | 911 |
| RAD51-10 | + | GGAAUUCUGAAAGCCGCUGG | 20 | 912 |
| RAD51-11 | + | GGAGAGUGCGGCGCUUCCCG | 20 | 913 |
| RAD51-12 | + | GGCAGUCUGUAAACUCGCGC | 20 | 914 |
| RAD51-13 | + | GGGAUACGUUACGUCGACGC | 20 | 915 |
| RAD51-14 | + | GGGCGGAAGCGGGGAGAAGG | 20 | 916 |
| RAD51-15 | + | GGGCGUGACCCUGGGCGAGA | 20 | 917 |
| RAD51-16 | + | GGGGAGAAGGCGGAUCCGGG | 20 | 918 |
| RAD51-17 | + | GGGGAUACGUUACGUCGACG | 20 | 919 |
| RAD51-18 | + | GUCGACGCGGGCGUGACCCU | 20 | 920 |
| RAD51-19 | + | GUUAGCGCGCAGGGCGGAAG | 20 | 921 |

[0719] Table II.23B provides exemplary targeting domains of gRNAs to be used with an eiCas9 fusion molecule (e.g., an eiCas9 fused to a transcription activator or repressor domain) to alter (e.g., activate or repress) a gene, e.g., RAD51 gene. The targeting domains of gRNAs were selected according to the second tier parameters. The targeting domains bind within 500 bp spanning a transcription start site (TSS), e.g., upstream or downstream of a TSS and have a high level of orthogonality. It is contemplated herein that in an embodiment the targeting domain hybridizes to the target domain through complementary base pairing. Any of the targeting domains in the table can be used with a S. pyogenes eiCas9 fusion molecule (e.g., an eiCas9 fused to a transcription activator or repressor domain) to alter (e.g., activate or repress) the RAD51 gene. One or more gRNA may be used to target an eiCas9 fusion molecule to a region spanning 500 bp of a transcription start site (TSS) of the RAD51 gene.

TABLE II.23B
Exemplary HDR-enhancing gRNAs Targeting a RAD51 Gene

| S. pyogenes | A high level of orthogonality | | | |
|---|---|---|---|---|
| 2nd Tier | 23B | | | |
| gRNA | | | Target Site | Seq |
| Name | DNA Strand | Targeting Domain | Length | ID |
| RAD51-20 | + | AAGCGGGGAGAAGGCGGAUC | 20 | 922 |
| RAD51-21 | + | AAGCUCUCGAGCUCCCGUCU | 20 | 923 |
| RAD51-22 | + | AGCUCUCGAGCUCCCGUCUU | 20 | 924 |
| RAD51-23 | − | AGUUCCCAGCUGCACGCCUC | 20 | 925 |
| RAD51-24 | + | CCCGUCUUGGGUUAGCGCGC | 20 | 926 |
| RAD51-25 | − | CCCUGCGCGCUAACCCAAGA | 20 | 927 |
| RAD51-26 | − | CCGCCAAACCCUCUCGCCCA | 20 | 928 |
| RAD51-27 | + | CCGUCUUGGGUUAGCGCGCA | 20 | 929 |
| RAD51-28 | − | CCUGCGCGCUAACCCAAGAC | 20 | 930 |
| RAD51-29 | − | CGCUGCGCGCGGUCCGCCAG | 20 | 931 |
| RAD51-30 | + | CGCUGGCGGACCGCGCGCAG | 20 | 932 |
| RAD51-31 | + | CGGGCGUGACCCUGGGCGAG | 20 | 933 |
| RAD51-32 | − | CGGUCUCUGGCCGCUGCGCG | 20 | 934 |
| RAD51-33 | − | CGUAACGUAUCCCCGCCUCC | 20 | 935 |
| RAD51-34 | + | CGUCGACGCGGGCGUGACCC | 20 | 936 |
| RAD51-35 | + | UAGCGCGCAGGGCGGAAGCG | 20 | 937 |
| RAD51-36 | + | UCAUCUGGGUUGUGCGCAGA | 20 | 938 |
| RAD51-37 | + | UCUUGGGUUAGCGCGCAGGG | 20 | 939 |
| RAD51-38 | + | UGGGUUGUGCGCAGAAGGCU | 20 | 940 |
| RAD51-39 | + | UUAGCGCGCAGGGCGGAAGC | 20 | 941 |

[0720] Table II.24A provides exemplary targeting domains of gRNAs to be used with an eiCas9 fusion molecule (e.g., an eiCas9 fused to a transcription activator or repressor domain) to alter (e.g., activate or repress) a gene, e.g., RAD51 gene. The targeting domains of gRNAs were selected according to the first tier parameters. The targeting domains bind within 500 bp spanning a transcription start site (TSS), e.g., upstream or downstream of a TSS, have a high level of orthogonality, start with a 5′G and PAM is NNGRRT. It is contemplated herein that in an embodiment the targeting domain hybridizes to the target domain through complementary base pairing. Any of the targeting domains in the table can be used with a S. aureus eiCas9 fusion molecule (e.g., an eiCas9 fused to a transcription activator or repressor domain) to alter (e.g., activate or repress) the RAD51 gene. One or more gRNA may be used to target an eiCas9 fusion molecule to a region spanning 500 bp of a transcription start site (TSS) of the RAD51 gene.

TABLE II.24A
Exemplary HDR-enhancing gRNAs Targeting a RAD51 Gene

| S. aureus | A high level of orthogonality, starts with a G, PAM is NNGRRT | | | |
|---|---|---|---|---|
| 1st Tier | 24A | | | |
| gRNA | | | Target Site | |
| Name | DNA Strand | Targeting Domain | Length | Seq ID |
| RAD51-40 | − | GAGCUCGAGAGCUUGAUCCUGC | 22 | 942 |
| RAD51-41 | + | GAGGGCAGUCUGUAAACUCGCG | 22 | 943 |
| RAD51-42 | + | GCAGCUGGGAACUGCAACUCAU | 22 | 944 |
| RAD51-43 | + | GCAGGGCGGAAGCGGGGAGAAG | 22 | 945 |
| RAD51-44 | + | GGAGAAGGCGGAUCCGGGAGGC | 22 | 946 |

[0721] Table II.24B provides exemplary targeting domains of gRNAs to be used with an eiCas9 fusion molecule (e.g., an eiCas9 fused to a transcription activator or repressor domain) to alter (e.g., activate or repress) a gene, e.g., RAD51 gene. The targeting domains of gRNAs were selected according to the second tier parameters. The targeting domains bind within 500 bp spanning a transcription start site (TSS), e.g., upstream or downstream of a TSS, have a high level of orthogonality and PAM is NNGRRT. It is contemplated herein that in an embodiment the targeting domain hybridizes to the target domain through complementary base pairing. Any of the targeting domains in the table can be used with a S. aureus eiCas9 fusion molecule (e.g., an eiCas9 fused to a transcription activator or repressor domain) to alter (e.g., activate or repress) the RAD51 gene. One or more gRNA may be used to target an eiCas9 fusion molecule to a region spanning 500 bp of a transcription start site (TSS) of the RAD51 gene.

TABLE II.24B
Exemplary HDR-enhancing gRNAs Targeting a RAD51 Gene

| S. aureus | A high level of orthogonality, and PAM is NNGRRT | | | |
|---|---|---|---|---|
| 2nd Tier | 24B | | | |
| gRNA | | | Target Site | Seq |
| Name | DNA Strand | Targeting Domain | Length | ID |
| RAD51-45 | + | ACCCUGGGCGAGAGGGUUUGGC | 22 | 947 |
| RAD51-46 | + | ACGCGGGCGUGACCCUGGGCGA | 22 | 948 |
| RAD51-47 | + | AUCAAGCUCUCGAGCUCCCGUC | 22 | 949 |
| RAD51-48 | − | AUUCCCGCCAAACCCUCUCGCC | 22 | 950 |
| RAD51-49 | − | CAGCCUUCUGCGCACAACCCAG | 22 | 951 |
| RAD51-50 | − | CGACGUAACGUAUCCCCGCCUC | 22 | 952 |
| RAD51-51 | − | CGCGCGGUCCGCCAGCGGCUUU | 22 | 953 |
| RAD51-52 | + | CGGCCAGAGACCGAGCCCUAAG | 22 | 954 |

[0722] Table II.25A provides exemplary targeting domains of gRNAs to be used with an eiCas9 fusion molecule (e.g., an eiCas9 fused to a transcription activator or repressor domain) to alter (e.g., activate or repress) a gene, e.g., XRCC1 gene. The targeting domains of gRNAs were selected according to the first tier parameters. The targeting domains bind within 500 bp spanning a transcription start site (TSS), e.g., upstream or downstream of a TSS, have a high level of orthogonality and start with a 5′G. It is contemplated herein that in an embodiment the targeting domain hybridizes to the target domain through complementary base pairing. Any of the targeting domains in the table can be used with a S. pyogenes eiCas9 fusion molecule (e.g., an eiCas9 fused to a transcription activator or repressor domain) to alter (e.g., activate or repress) the XRCC1 gene. One or more gRNA may be used to target an eiCas9 fusion molecule to a region spanning 500 bp of a transcription start site (TSS) of the XRCC1 gene.

TABLE II.25A
Exemplary HDR-enhancing gRNAs Targeting a XRCC1 Gene

| S. pyogenes | A high level of orthogonality, and starts with a G | | | |
|---|---|---|---|---|
| 1st Tier | 25A | | | |
| gRNA | | | Target Site | Seq |
| Name | DNA Strand | Targeting Domain | Length | ID |
| XRCC1-1 | − | GAAGGAUGAGGUAGAGUAUG | 20 | 955 |
| XRCC1-2 | − | GACAUGGGGUGAGAGGGCGG | 20 | 956 |
| XRCC1-3 | + | GACGCCGGCGCCGGCGCGCC | 20 | 957 |
| XRCC1-4 | − | GACGUCCGAACCCUGCUUUC | 20 | 958 |
| XRCC1-5 | − | GAGGUAGAGUAUGGGGUCCG | 20 | 959 |
| XRCC1-6 | − | GAGUAUGGGGUCCGAGGGGC | 20 | 960 |
| XRCC1-7 | + | GCGCUCUUCCCGCUCUGGAG | 20 | 961 |
| XRCC1-8 | + | GCGGGGUUGUGUGUGGCGGA | 20 | 962 |
| XRCC1-9 | + | GGAGGAAACGCUCGUUGCUA | 20 | 963 |
| XRCC1-10 | + | GGCUAGAGCGGGGUUGUGUG | 20 | 964 |
| XRCC1-11 | + | GGCUCCCAGAAAGCAGGGUU | 20 | 965 |
| XRCC1-12 | − | GGCUCGGGCCUUUCAAACCC | 20 | 966 |
| XRCC1-13 | + | GGCUUGCGCAGUGUCGACGC | 20 | 967 |
| XRCC1-14 | − | GGGCGGGGUGCGCCCUGCGC | 20 | 968 |
| XRCC1-15 | + | GGGUUGUGUGUGGCGGAGGG | 20 | 969 |
| XRCC1-16 | − | GGUAGAGUAUGGGGUCCGAG | 20 | 970 |
| XRCC1-17 | − | GGUCCGAGGGGCAGGGAGAG | 20 | 971 |
| XRCC1-18 | − | GUCCGAGGGGCAGGGAGAGU | 20 | 972 |
| XRCC1-19 | − | GUGCGCAAGCGCGCGAGGCU | 20 | 973 |
| XRCC1-20 | − | GUGGGCUUCGCCUGGCCAGA | 20 | 974 |

[0723] Table II.25B provides exemplary targeting domains of gRNAs to be used with an eiCas9 fusion molecule (e.g., an eiCas9 fused to a transcription activator or repressor domain) to alter (e.g., activate or repress) a gene, e.g., XRCC1 gene. The targeting domains of gRNAs were selected according to the second tier parameters. The targeting domains bind within 500 bp spanning a transcription start site (TSS), e.g., upstream or downstream of a TSS and have a high level of orthogonality. It is contemplated herein that in an embodiment the targeting domain hybridizes to the target domain through complementary base pairing. Any of the targeting domains in the table can be used with a S. pyogenes eiCas9 fusion molecule (e.g., an eiCas9 fused to a transcription activator or repressor domain) to alter (e.g., activate or repress) the XRCC1 gene. One or more gRNA may be used to target an eiCas9 fusion molecule to a region spanning 500 bp of a transcription start site (TSS) of the XRCC1 gene.

TABLE II.25B
Exemplary HDR-enhancing gRNAs Targeting a XRCC1 Gene

| S. pyogenes | A high level of orthogonality | | | |
|---|---|---|---|---|
| 2nd Tier | 25B | | | |
| gRNA | | | Target Site | Seq |
| Name | DNA Strand | Targeting Domain | Length | ID |
| XRCC1-21 | + | AAGCAGGGUUCGGACGUCAU | 20 | 975 |
| XRCC1-22 | − | ACAUGGCGGAGGCGGAUCUC | 20 | 976 |
| XRCC1-23 | + | ACGCAGCGCUCUUCCCGCUC | 20 | 977 |
| XRCC1-24 | − | ACGUCCGAACCCUGCUUUCU | 20 | 978 |
| XRCC1-25 | + | ACUCCAUCGUGCAAUGAGAA | 20 | 979 |
| XRCC1-26 | + | AGCAGGGUUCGGACGUCAUU | 20 | 980 |
| XRCC1-27 | + | AGGGUUCGGACGUCAUUGGG | 20 | 981 |
| XRCC1-28 | − | CAGUCGCGCCUCUCCAGAGC | 20 | 982 |
| XRCC1-29 | + | CCGCUCUGGAGAGGCGCGAC | 20 | 983 |
| XRCC1-30 | + | CCGGCGCGCCGGGGUUUGAA | 20 | 984 |
| XRCC1-31 | − | CCUUUCAAACCCCGGCGCGC | 20 | 985 |
| XRCC1-32 | − | CGACCUCCGGGAUUGGUGUC | 20 | 986 |
| XRCC1-33 | + | CGCUCUGGAGAGGCGCGACU | 20 | 987 |
| XRCC1-34 | − | CUCCGGCAUGUCAACGUCGU | 20 | 988 |
| XRCC1-35 | − | UCAACGUCGUGGGCUUCGCC | 20 | 989 |
| XRCC1-36 | + | UCGGACGUCAUUGGGAGGCG | 20 | 990 |
| XRCC1-37 | − | UCUCCGGCAUGUCAACGUCG | 20 | 991 |
| XRCC1-38 | − | UGCGCAAGCGCGCGAGGCUC | 20 | 992 |
| XRCC1-39 | + | UGCGCACUUUAGCCAGCGCA | 20 | 993 |
| XRCC1-40 | + | UUGCGCACUUUAGCCAGCGC | 20 | 994 |

[0724] Table II.26A provides exemplary targeting domains of gRNAs to be used with an eiCas9 fusion molecule (e.g., an eiCas9 fused to a transcription activator or repressor domain) to alter (e.g., activate or repress) a gene, e.g., XRCC1 gene. The targeting domains of gRNAs were selected according to the first tier parameters. The targeting domains bind within 500 bp spanning a transcription start site (TSS), e.g., upstream or downstream of a TSS, have a high level of orthogonality, start with a 5′G and PAM is NNGRRT. It is contemplated herein that in an embodiment the targeting domain hybridizes to the target domain through complementary base pairing. Any of the targeting domains in the table can be used with a S. aureus eiCas9 fusion molecule (e.g., an eiCas9 fused to a transcription activator or repressor domain) to alter (e.g., activate or repress) the XRCC1 gene. One or more gRNA may be used to target an eiCas9 fusion molecule to a region spanning 500 bp of a transcription start site (TSS) of the XRCC1 gene.

TABLE II.26A
Exemplary HDR-enhancing gRNAs Targeting a XRCC1 Gene

| S. aureus | A high level of orthogonality, starts with a G, PAM is NNGRRT | | | |
|---|---|---|---|---|
| 1st Tier | 26A | | | |
| gRNA | | | Target Site | |
| Name | DNA Strand | Targeting Domain | Length | Seq ID |
| XRCC1-41 | − | GACAGGGUCUUGCUCUCUCACC | 22 | 995 |
| XRCC1-42 | + | GAUCGUGCCACUGCACUCCAUC | 22 | 996 |
| XRCC1-43 | − | GCCAGAAGGAUGAGGUAGAGUA | 22 | 997 |
| XRCC1-44 | − | GCCUAGCAACAGAAGCGACCUC | 22 | 998 |
| XRCC1-45 | + | GCUACUUAGGAGGCUGAAGUGG | 22 | 999 |
| XRCC1-46 | + | GGAUCCCUUGGCCCCAGGAGAC | 22 | 1000 |
| XRCC1-47 | − | GGGCAGGGAGAGUGGGAGGGGG | 22 | 1001 |
| XRCC1-48 | − | GGUCUUGCUCUCUCACCCAGGA | 22 | 1002 |
| XRCC1-49 | + | GUCGACGCCGGCGCCGGCGCGC | 22 | 1003 |
| XRCC1-50 | − | GUCGUGGGCUUCGCCUGGCCAG | 22 | 1004 |

[0725] Table II.26B provides exemplary targeting domains of gRNAs to be used with an eiCas9 fusion molecule (e.g., an eiCas9 fused to a transcription activator or repressor domain) to alter (e.g., activate or repress) a gene, e.g., XRCC1 gene. The targeting domains of gRNAs were selected according to the second tier parameters. The targeting domains bind within 500 bp spanning a transcription start site (TSS), e.g., upstream or downstream of a TSS, have a high level of orthogonality and PAM is NNGRRT. It is contemplated herein that in an embodiment the targeting domain hybridizes to the target domain through complementary base pairing. Any of the targeting domains in the table can be used with a S. aureus eiCas9 fusion molecule (e.g., an eiCas9 fused to a transcription activator or repressor domain) to alter (e.g., activate or repress) the XRCC1 gene. One or more gRNA may be used to target an eiCas9 fusion molecule to a region spanning 500 bp of a transcription start site (TSS) of the XRCC1 gene.

TABLE II.26B
Exemplary HDR-enhancing gRNAs Targeting a XRCC1 Gene

| S. aureus | A high level of orthogonality, and PAM is NNGRRT | | | |
|---|---|---|---|---|
| 2nd Tier | 26B | | | |
| gRNA | | | Target Site | Seq |
| Name | DNA Strand | Targeting Domain | Length | ID |
| XRCC1-51 | + | ACUCCAUCGUGCAAUGAGAAAG | 22 | 1005 |
| XRCC1-52 | − | AGUAUGGGGUCCGAGGGGCAGG | 22 | 1006 |
| XRCC1-53 | − | AUUCGCCUUUCUCAUUGCACGA | 22 | 1007 |
| XRCC1-54 | − | CAACCCCUGUCUCCUGGGGCCA | 22 | 1008 |
| XRCC1-55 | + | CCACAAAAAAUACAAAAAUUAG | 22 | 1009 |
| XRCC1-56 | − | CCACUUCAGCCUCCUAAGUAGC | 22 | 1010 |
| XRCC1-57 | + | CUGUUGCUAGGCUCCCAGAAAG | 22 | 1011 |
| XRCC1-58 | + | UCAUUGGGAGGCGAGGCUAGAG | 22 | 1012 |
| XRCC1-59 | − | UCGCCUGGCCAGAAGGAUGAGG | 22 | 1013 |
| XRCC1-60 | − | UUUUAAAAAUUUUUUGUUGAGA | 22 | 1014 |
| XRCC1-61 | − | UUUUGUAUUUUUUGUGGAGACA | 22 | 1015 |

[0726] Table II.27A provides exemplary targeting domains of gRNAs to be used with an eiCas9 fusion molecule (e.g., an eiCas9 fused to a transcription activator or repressor domain) to alter (e.g., activate or repress) a gene, e.g., LIG1 gene. The targeting domains of gRNAs were selected according to the first tier parameters. The targeting domains bind within 500 bp spanning a transcription start site (TSS), e.g., upstream or downstream of a TSS, have a high level of orthogonality and start with a 5′G. It is contemplated herein that in an embodiment the targeting domain hybridizes to the target domain through complementary base pairing. Any of the targeting domains in the table can be used with a S. pyogenes eiCas9 fusion molecule (e.g., an eiCas9 fused to a transcription activator or repressor domain) to alter (e.g., activate or repress) the LIG1 gene. One or more gRNA may be used to target an eiCas9 fusion molecule to a region spanning 500 bp of a transcription start site (TSS) of the LIG1 gene.

TABLE II.27A
Exemplary HDR-enhancing gRNAs Targeting a LIG1 Gene

| S. pyogenes | A high level of orthogonality, and starts with a G | | | |
|---|---|---|---|---|
| 1st Tier | 27A | | | |
| gRNA | | | Target Site | Seq |
| Name | DNA Strand | Targeting Domain | Length | ID |
| LIG1-1 | − | GACGUCUGCGGGCGGGGGCG | 20 | 1016 |
| LIG1-2 | + | GACUGCAGAGGCGCGCCUGG | 20 | 1017 |
| LIG1-3 | − | GCAACACACUCAGAUCCGCC | 20 | 1018 |
| LIG1-4 | − | GCAGUCCCAAGUUCGCGCCA | 20 | 1019 |
| LIG1-5 | − | GCCCGCGCUUUCCCUCGCCC | 20 | 1020 |
| LIG1-6 | − | GCCGUCGCGCGGAGGACACU | 20 | 1021 |
| LIG1-7 | + | GCCUAUGCUUCGCCAUGUCG | 20 | 1022 |
| LIG1-8 | + | GCGCGAACUUGGGACUGCAG | 20 | 1023 |
| LIG1-9 | − | GCGCGCAGACGUCUGCGGGC | 20 | 1024 |
| LIG1-10 | − | GCGGGGCAUCCCGGGAGCAA | 20 | 1025 |
| LIG1-11 | − | GGAGACCGCGCGGGGCAUCC | 20 | 1026 |
| LIG1-12 | − | GGAGUCGUAGUCUCCCGAAU | 20 | 1027 |
| LIG1-13 | + | GGCCUAUGCUUCGCCAUGUC | 20 | 1028 |
| LIG1-14 | + | GGCGGGUGCGCCGAAUGCUU | 20 | 1029 |
| LIG1-15 | + | GGGACCAACGCAAGGCAAGU | 20 | 1030 |
| LIG1-16 | − | GGGAGUCGUAGUCUCCCGAA | 20 | 1031 |
| LIG1-17 | + | GGGCCUAUGCUUCGCCAUGU | 20 | 1032 |
| LIG1-18 | + | GGGGCCGUCCGCAAGCAGAU | 20 | 1033 |
| LIG1-19 | − | GGUCUGAGGAGUGACUGGCA | 20 | 1034 |
| LIG1-20 | − | GUCGUAGUCUCCCGAAUGGG | 20 | 1035 |

[0727] Table II.27B provides exemplary targeting domains of gRNAs to be used with an eiCas9 fusion molecule (e.g., an eiCas9 fused to a transcription activator or repressor domain) to alter (e.g., activate or repress) a gene, e.g., LIG1 gene. The targeting domains of gRNAs were selected according to the second tier parameters. The targeting domains bind within 500 bp spanning a transcription start site (TSS), e.g., upstream or downstream of a TSS and have a high level of orthogonality. It is contemplated herein that in an embodiment the targeting domain hybridizes to the target domain through complementary base pairing. Any of the targeting domains in the table can be used with a S. pyogenes eiCas9 fusion molecule (e.g., an eiCas9 fused to a transcription activator or repressor domain) to alter (e.g., activate or repress) the LIG1 gene. One or more gRNA may be used to target an eiCas9 fusion molecule to a region spanning 500 bp of a transcription start site (TSS) of the LIG1 gene.

TABLE II.27B
Exemplary HDR-enhancing gRNAs Targeting a LIG1 Gene

| S. pyogenes | A high level of orthogonality | | | |
|---|---|---|---|---|
| 2nd Tier | 27B | | | |
| gRNA | | | Target Site | Seq |
| Name | DNA Strand | Targeting Domain | Length | ID |
| LIG1-21 | + | ACACCCGCUCAUCCAGGGCG | 20 | 1036 |
| LIG1-22 | + | ACGUCUGCGCGCGAAUGCCG | 20 | 1037 |
| LIG1-23 | − | AUUCGCGCGCAGACGUCUGC | 20 | 1038 |
| LIG1-24 | + | CACCCGCUCAUCCAGGGCGA | 20 | 1039 |
| LIG1-25 | + | CAGUGUCCUCCGCGCGACGG | 20 | 1040 |
| LIG1-26 | − | CAUUCGCGCGCAGACGUCUG | 20 | 1041 |
| LIG1-27 | − | CGCCGUCGCGCGGAGGACAC | 20 | 1042 |
| LIG1-28 | − | CGCGCGCAGACGUCUGCGGG | 20 | 1043 |
| LIG1-29 | + | CGGCGCGCGGGACCAACGCA | 20 | 1044 |
| LIG1-30 | + | CGGCGGGUGCGCCGAAUGCU | 20 | 1045 |
| LIG1-31 | + | CGGCGGUGCGGACGGUGCCC | 20 | 1046 |
| LIG1-32 | + | CGGGACCAACGCAAGGCAAG | 20 | 1047 |
| LIG1-33 | + | UCCCAGUGUCCUCCGCGCGA | 20 | 1048 |
| LIG1-34 | + | UCCGCGCGACGGCGGCGGUG | 20 | 1049 |
| LIG1-35 | − | UCGCCCUGGAUGAGCGGGUG | 20 | 1050 |
| LIG1-36 | − | UCGGUGGAAGCGCCCCCGCG | 20 | 1051 |
| LIG1-37 | + | UCUCUUCCCGCCGUGCCUCG | 20 | 1052 |
| LIG1-38 | + | UCUUCCCGCCGUGCCUCGCG | 20 | 1053 |
| LIG1-39 | + | UGUCCUCCGCGCGACGGCGG | 20 | 1054 |
| LIG1-40 | − | UUCCCUCGCCCUGGAUGAGC | 20 | 1055 |

[0728] Table II.28A provides exemplary targeting domains of gRNAs to be used with an eiCas9 fusion molecule (e.g., an eiCas9 fused to a transcription activator or repressor domain) to alter (e.g., activate or repress) a gene, e.g., LIG1 gene. The targeting domains of gRNAs were selected according to the first tier parameters. The targeting domains bind within 500 bp spanning a transcription start site (TSS), e.g., upstream or downstream of a TSS, have a high level of orthogonality, start with a 5′G and PAM is NNGRRT. It is contemplated herein that in an embodiment the targeting domain hybridizes to the target domain through complementary base pairing. Any of the targeting domains in the table can be used with a S. aureus eiCas9 fusion molecule (e.g., an eiCas9 fused to a transcription activator or repressor domain) to alter (e.g., activate or repress) the LIG1 gene. One or more gRNA may be used to target an eiCas9 fusion molecule to a region spanning 500 bp of a transcription start site (TSS) of the LIG1 gene.

TABLE II.28A
Exemplary HDR-enhancing gRNAs Targeting a LIG1 Gene

| S. aureus | A high level of orthogonality, starts with a G, PAM is NNGRRT | | | |
|---|---|---|---|---|
| 1st Tier | 28A | | | |
| gRNA | | | Target Site | Seq |
| Name | DNA Strand | Targeting Domain | Length | ID |
| LIG1-41 | + | GAGGCGGAGGGCGGCGGGUGCG | 22 | 1056 |
| LIG1-42 | − | GAGUGACUGGCAGGGAAAGAGG | 22 | 1057 |
| LIG1-43 | − | GGACACUGGGAGUCGUAGUCUC | 22 | 1058 |
| LIG1-44 | + | GGCCUGGCCCGGCCCUUGCUCC | 22 | 1059 |

[0729] Table II.28B provides exemplary targeting domains of gRNAs to be used with an eiCas9 fusion molecule (e.g., an eiCas9 fused to a transcription activator or repressor domain) to alter (e.g., activate or repress) a gene, e.g., LIG1 gene. The targeting domains of gRNAs were selected according to the second tier parameters. The targeting domains bind within 500 bp spanning a transcription start site (TSS), e.g., upstream or downstream of a TSS, have a high level of orthogonality and PAM is NNGRRT. It is contemplated herein that in an embodiment the targeting domain hybridizes to the target domain through complementary base pairing. Any of the targeting domains in the table can be used with a S. aureus eiCas9 fusion molecule (e.g., an eiCas9 fused to a transcription activator or repressor domain) to alter (e.g., activate or repress) the LIG1 gene. One or more gRNA may be used to target an eiCas9 fusion molecule to a region spanning 500 bp of a transcription start site (TSS) of the LIG1 gene.

TABLE II.28B
Exemplary HDR-enhancing gRNAs Targeting a LIG1 Gene

| S. aureus | A high level of orthogonality, and PAM is NNGRRT | | | |
|---|---|---|---|---|
| 2nd Tier | 28B | | | |
| gRNA | | | Target Site | Seq |
| Name | DNA Strand | Targeting Domain | Length | ID |
| LIG1-45 | − | AAUGCCCGCGCUUUCCCUCGCC | 22 | 1060 |
| LIG1-46 | + | AGCAGAUGGGAGGCGGAGGGCG | 22 | 1061 |
| LIG1-47 | − | AGCGGGUGUGGCUGAGGGUCUG | 22 | 1062 |
| LIG1-48 | + | CCCCGCCCGCAGACGUCUGCGC | 22 | 1063 |
| LIG1-49 | − | CCCUGGAUGAGCGGGUGUGGCU | 22 | 1064 |
| LIG1-50 | − | CCGCCGUCGCGCGGAGGACACU | 22 | 1065 |
| LIG1-51 | − | CGAAUGGGAGGAGGGCGGGAAA | 22 | 1066 |
| LIG1-52 | + | CGCCAUGUCGGGGUGUCUGCAG | 22 | 1067 |
| LIG1-53 | − | CGCUUUCCCUCGCCCUGGAUGA | 22 | 1068 |
| LIG1-54 | + | UGCAGAGGCGCGCCUGGCGGAU | 22 | 1069 |
| LIG1-55 | + | UGGGACUGCAGAGGCGCGCCUG | 22 | 1070 |
| LIG1-56 | + | UGGGGCCUAUGCUUCGCCAUGU | 22 | 1071 |

[0730] Table II.29A provides exemplary targeting domains of gRNAs to be used with an eiCas9 fusion molecule (e.g., an eiCas9 fused to a transcription activator or repressor domain) to alter (e.g., activate or repress) a gene, e.g., LIG3 gene. The targeting domains of gRNAs were selected according to the first tier parameters. The targeting domains bind within 500 bp spanning a transcription start site (TSS), e.g., upstream or downstream of a TSS, have a high level of orthogonality and start with a 5′G. It is contemplated herein that in an embodiment the targeting domain hybridizes to the target domain through complementary base pairing. Any of the targeting domains in the table can be used with a S. pyogenes eiCas9 fusion molecule (e.g., an eiCas9 fused to a transcription activator or repressor domain) to alter (e.g., activate or repress) the LIG3 gene. One or more gRNA may be used to target an eiCas9 fusion molecule to a region spanning 500 bp of a transcription start site (TSS) of the LIG3 gene.

TABLE II.29A
Exemplary HDR-enhancing gRNAs Targeting a LIG3 Gene

| S. pyogenes | A high level of orthogonality, and starts with a G | | | |
|---|---|---|---|---|
| 1st Tier | 29A | | | |
| gRNA | | | Target Site | Seq |
| Name | DNA Strand | Targeting Domain | Length | ID |
| LIG3-1 | + | GAAUGCAACUACGACCCACG | 20 | 1072 |
| LIG3-2 | + | GACAGGCGCUCCAACCGUCG | 20 | 1073 |
| LIG3-3 | + | GAGCCGGAGAGGCAGGUGAG | 20 | 1074 |
| LIG3-4 | + | GAGGCAGGUGAGGGGCUACG | 20 | 1075 |
| LIG3-5 | − | GCGCCUGUCUCUUUAAAUCC | 20 | 1076 |
| LIG3-6 | − | GCGCGCAGGCGCAAGAGCCA | 20 | 1077 |
| LIG3-7 | + | GGACCCGGAUUUAAAGAGAC | 20 | 1078 |
| LIG3-8 | + | GGAGCCGGAGAGGCAGGUGA | 20 | 1079 |
| LIG3-9 | + | GGGGACCGGUCGCGUGGCCG | 20 | 1080 |
| LIG3-10 | + | GGGGGCGGGGACCGGUCGCG | 20 | 1081 |
| LIG3-11 | + | GGUGAGCGCCGGAGCCGGAG | 20 | 1082 |

[0731] Table II.29B provides exemplary targeting domains of gRNAs to be used with an eiCas9 fusion molecule (e.g., an eiCas9 fused to a transcription activator or repressor domain) to alter (e.g., activate or repress) a gene, e.g., LIG3 gene. The targeting domains of gRNAs were selected according to the second tier parameters. The targeting domains bind within 500 bp spanning a transcription start site (TSS), e.g., upstream or downstream of a TSS and have a high level of orthogonality. It is contemplated herein that in an embodiment the targeting domain hybridizes to the target domain through complementary base pairing. Any of the targeting domains in the table can be used with a S. pyogenes eiCas9 fusion molecule (e.g., an eiCas9 fused to a transcription activator or repressor domain) to alter (e.g., activate or repress) the LIG3 gene. One or more gRNA may be used to target an eiCas9 fusion molecule to a region spanning 500 bp of a transcription start site (TSS) of the LIG3 gene.

TABLE II.29B
Exemplary HDR-enhancing gRNAs Targeting a LIG3 Gene

| S. pyogenes | A high level of orthogonality | | | |
|---|---|---|---|---|
| 2nd Tier | 29B | | | |
| gRNA | | | Target Site | |
| Name | DNA Strand | Targeting Domain | Length | Seq ID |
| LIG3-12 | − | AACUUGCUCAUUACAGGCCG | 20 | 1083 |
| LIG3-13 | − | AAUCCGGGUCCUAGAGCGGG | 20 | 1084 |
| LIG3-14 | + | ACAGGCGCUCCAACCGUCGU | 20 | 1085 |
| LIG3-15 | + | ACUACGACCCACGUGGCAGA | 20 | 1086 |
| LIG3-16 | − | ACUUGCUCAUUACAGGCCGC | 20 | 1087 |
| LIG3-17 | + | CAACCGUCGUGGGCUGCCCG | 20 | 1088 |
| LIG3-18 | − | CAAGGCCGCGGCCACGCGAC | 20 | 1089 |
| LIG3-19 | − | CCGGCGCUCACCGUAGGCCU | 20 | 1090 |
| LIG3-20 | − | CCGGCUCCGGCGCUCACCGU | 20 | 1091 |
| LIG3-21 | + | CCUACGGUGAGCGCCGGAGC | 20 | 1092 |
| LIG3-22 | − | CCUCGGAACUUGCUCAUUAC | 20 | 1093 |
| LIG3-23 | + | CCUGUAAUGAGCAAGUUCCG | 20 | 1094 |
| LIG3-24 | − | CGCGGGCAGCCCACGACGGU | 20 | 1095 |
| LIG3-25 | + | CGGUCGCGUGGCCGCGGCCU | 20 | 1096 |
| LIG3-26 | + | CUACGACCCACGUGGCAGAC | 20 | 1097 |
| LIG3-27 | + | UACGACCCACGUGGCAGACG | 20 | 1098 |
| LIG3-28 | − | UAGAGCGGGAGGCAGCGCGC | 20 | 1099 |
| LIG3-29 | + | UGAGCAAGUUCCGAGGCCUA | 20 | 1100 |
| LIG3-30 | − | UUAAAUCCGGGUCCUAGAGC | 20 | 1101 |
| LIG3-31 | − | UUUAAAUCCGGGUCCUAGAG | 20 | 1102 |

[0732] Table II.30A provides exemplary targeting domains of gRNAs to be used with an eiCas9 fusion molecule (e.g., an eiCas9 fused to a transcription activator or repressor domain) to alter (e.g., activate or repress) a gene, e.g., LIG3 gene. The targeting domains of gRNAs were selected according to the first tier parameters. The targeting domains bind within 500 bp spanning a transcription start site (TSS), e.g., upstream or downstream of a TSS, have a high level of orthogonality, start with a 5′G and PAM is NNGRRT. It is contemplated herein that in an embodiment the targeting domain hybridizes to the target domain through complementary base pairing. Any of the targeting domains in the table can be used with a S. aureus eiCas9 fusion molecule (e.g., an eiCas9 fused to a transcription activator or repressor domain) to alter (e.g., activate or repress) the LIG3 gene. One or more gRNA may be used to target an eiCas9 fusion molecule to a region spanning 500 bp of a transcription start site (TSS) of the LIG3 gene.

TABLE II.30A
Exemplary HDR-enhancing gRNAs Targeting a LIG3 Gene

| S. aureus | A high level of orthogonality, starts with a G, PAM is NNGRRT | | | |
|---|---|---|---|---|
| 1st Tier | 30A | | | |
| gRNA | | | Target Site | |
| Name | DNA Strand | Targeting Domain | Length | Seq ID |
| LIG3-32 | + | GCGCUGCCUCCCGCUCUAGGAC | 22 | 1103 |
| LIG3-33 | − | GGUCCCCGCCCCCGUCUGCCAC | 22 | 1104 |

[0733] Table II.30B provides exemplary targeting domains of gRNAs to be used with an eiCas9 fusion molecule (e.g., an eiCas9 fused to a transcription activator or repressor domain) to alter (e.g., activate or repress) a gene, e.g., LIG3 gene. The targeting domains of gRNAs were selected according to the second tier parameters. The targeting domains bind within 500 bp spanning a transcription start site (TSS), e.g., upstream or downstream of a TSS, have a high level of orthogonality and PAM is NNGRRT. It is contemplated herein that in an embodiment the targeting domain hybridizes to the target domain through complementary base pairing. Any of the targeting domains in the table can be used with a S. aureus eiCas9 fusion molecule (e.g., an eiCas9 fused to a transcription activator or repressor domain) to alter (e.g., activate or repress) the LIG3 gene. One or more gRNA may be used to target an eiCas9 fusion molecule to a region spanning 500 bp of a transcription start site (TSS) of the LIG3 gene.

TABLE II.30B
Exemplary HDR-enhancing gRNAs Targeting a LIG3 Gene

| S. aureus | A high level of orthogonality, and PAM is NNGRRT | | | |
|---|---|---|---|---|
| 2nd Tier | 30B | | | |
| gRNA | | | Target Site | |
| Name | DNA Strand | Targeting Domain | Length | Seq ID |
| LIG3-34 | + | CUCCCAAACAUCACAGGGCAGG | 22 | 1105 |
| LIG3-35 | − | UGGAGCGCCUGUCUCUUUAAAU | 22 | 1106 |
| LIG3-36 | − | UUCUGCCUGCCCUGUGAUGUUU | 22 | 1107 |

[0734] Table II.31A provides exemplary targeting domains of gRNAs to be used with an eiCas9 fusion molecule (e.g., an eiCas9 fused to a transcription activator or repressor domain) to alter (e.g., activate or repress) a gene, e.g., POLQ gene. The targeting domains of gRNAs were selected according to the first tier parameters. The targeting domains bind within 500 bp spanning a transcription start site (TSS), e.g., upstream or downstream of a TSS, have a high level of orthogonality and start with a 5′G. It is contemplated herein that in an embodiment the targeting domain hybridizes to the target domain through complementary base pairing. Any of the targeting domains in the table can be used with a S. pyogenes eiCas9 fusion molecule (e.g., an eiCas9 fused to a transcription activator or repressor domain) to alter (e.g., activate or repress) the POLQ gene. One or more gRNA may be used to target an eiCas9 fusion molecule to a region spanning 500 bp of a transcription start site (TSS) of the POLQ gene.

TABLE II.31A
Exemplary HDR-enhancing gRNAs Targeting a POLQ Gene

| S. pyogenes | A high level of orthogonality, and starts with a G | | | |
|---|---|---|---|---|
| 1st Tier | 31A | | | |
| gRNA | | | Target Site | |
| Name | DNA Strand | Targeting Domain | Length | Seq ID |
| POLQ-1 | + | GAACUCUAUGGUUCCGGGGC | 20 | 1108 |
| POLQ-2 | + | GAGGGAGGACGCUGGGACUG | 20 | 1109 |
| POLQ-3 | + | GCUCCUUCCCCACGAGUCUA | 20 | 1110 |
| POLQ-4 | + | GGACUGUGGCUUGCCCUGAU | 20 | 1111 |
| POLQ-5 | + | GGAGGUUUGAGUUUGAAGAC | 20 | 1112 |
| POLQ-6 | − | GGGGAAGGAGCGGCUCUCGC | 20 | 1113 |
| POLQ-7 | + | GGUUUGAGUUUGAAGACUGG | 20 | 1114 |
| POLQ-8 | − | GUCCCAGCGUCCUCCCUCUC | 20 | 1115 |
| POLQ-9 | − | GUCUUCAAACUCAAACCUCC | 20 | 1116 |
| POLQ-10 | + | GUUUGAGUUUGAAGACUGGC | 20 | 1117 |

[0735] Table II.31B provides exemplary targeting domains of gRNAs to be used with an eiCas9 fusion molecule (e.g., an eiCas9 fused to a transcription activator or repressor domain) to alter (e.g., activate or repress) a gene, e.g., POLQ gene. The targeting domains of gRNAs were selected according to the second tier parameters. The targeting domains bind within 500 bp spanning a transcription start site (TSS), e.g., upstream or downstream of a TSS and have a high level of orthogonality. It is contemplated herein that in an embodiment the targeting domain hybridizes to the target domain through complementary base pairing. Any of the targeting domains in the table can be used with a S. pyogenes eiCas9 fusion molecule (e.g., an eiCas9 fused to a transcription activator or repressor domain) to alter (e.g., activate or repress) the POLQ gene. One or more gRNA may be used to target an eiCas9 fusion molecule to a region spanning 500 bp of a transcription start site (TSS) of the POLQ gene.

TABLE II.31B
Exemplary HDR-enhancing gRNAs Targeting a POLQ Gene

| S. pyogenes | A high level of orthogonality | | | |
|---|---|---|---|---|
| 2nd Tier | 31B | | | |
| gRNA | | | Target Site | |
| Name | DNA Strand | Targeting Domain | Length | Seq ID |
| POLQ-11 | − | AAGCCAUAGACUCGUGGGGA | 20 | 1118 |
| POLQ-12 | − | ACCCGAAAGCCAUAGACUCG | 20 | 1119 |
| POLQ-13 | + | AGAACUCUAUGGUUCCGGGG | 20 | 1120 |
| POLQ-14 | + | AGGCCAGGGUUCUCCCGAGA | 20 | 1121 |
| POLQ-15 | + | CACGGAGAACUCUAUGGUUC | 20 | 1122 |
| POLQ-16 | + | CAGGCCAGGGUUCUCCCGAG | 20 | 1123 |
| POLQ-17 | + | CCAGGGUUCUCCCGAGAGGG | 20 | 1124 |
| POLQ-18 | + | CCCACGAGUCUAUGGCUUUC | 20 | 1125 |
| POLQ-19 | + | CCCCACGAGUCUAUGGCUUU | 20 | 1126 |
| POLQ-20 | − | CCCGAAAGCCAUAGACUCGU | 20 | 1127 |
| POLQ-21 | − | CCGAAAGCCAUAGACUCGUG | 20 | 1128 |
| POLQ-22 | − | CGGAACCAUAGAGUUCUCCG | 20 | 1129 |
| POLQ-23 | + | CGGAGAACUCUAUGGUUCCG | 20 | 1130 |
| POLQ-24 | + | CUAUGGUUCCGGGGCGGGCC | 20 | 1131 |
| POLQ-25 | + | CUCCCGAGAGGGAGGACGCU | 20 | 1132 |
| POLQ-26 | − | UCAAACCUCCCGGCCCGCCC | 20 | 1133 |
| POLQ-27 | − | UCGCUGGCGUCUAAGACUUC | 20 | 1134 |
| POLQ-28 | + | UCUAUGGUUCCGGGGCGGGC | 20 | 1135 |
| POLQ-29 | + | UCUCCCGAGAGGGAGGACGC | 20 | 1136 |
| POLQ-30 | + | UUAAGCCACGGAGAACUCUA | 20 | 1137 |

[0736] Table II.32A provides exemplary targeting domains of gRNAs to be used with an eiCas9 fusion molecule (e.g., an eiCas9 fused to a transcription activator or repressor domain) to alter (e.g., activate or repress) a gene, e.g., POLQ gene. The targeting domains of gRNAs were selected according to the first tier parameters. The targeting domains bind within 500 bp spanning a transcription start site (TSS), e.g., upstream or downstream of a TSS, have a high level of orthogonality, start with a 5′G and PAM is NNGRRT. It is contemplated herein that in an embodiment the targeting domain hybridizes to the target domain through complementary base pairing. Any of the targeting domains in the table can be used with a S. aureus eiCas9 fusion molecule (e.g., an eiCas9 fused to a transcription activator or repressor domain) to alter (e.g., activate or repress) the POLQ gene. One or more gRNA may be used to target an eiCas9 fusion molecule to a region spanning 500 bp of a transcription start site (TSS) of the POLQ gene.

TABLE II.32A
Exemplary HDR-enhancing gRNA Targeting a POLQ Gene

| S. aureus | A high level of orthogonality, starts with a G, PAM is NNGRRT | | | |
|---|---|---|---|---|
| 1st Tier | 32A | | | |
| gRNA | | | Target Site | |
| Name | DNA Strand | Targeting Domain | Length | Seq ID |
| POLQ-31 | + | GUUCCGGGGCGGGCCGGGAGGU | 22 | 1138 |

[0737] Table II.32B provides exemplary targeting domains of gRNAs to be used with an eiCas9 fusion molecule (e.g., an eiCas9 fused to a transcription activator or repressor domain) to alter (e.g., activate or repress) a gene, e.g., POLQ gene. The targeting domains of gRNAs were selected according to the second tier parameters. The targeting domains bind within 500 bp spanning a transcription start site (TSS), e.g., upstream or downstream of a TSS, have a high level of orthogonality and PAM is NNGRRT. It is contemplated herein that in an embodiment the targeting domain hybridizes to the target domain through complementary base pairing. Any of the targeting domains in the table can be used with a S. aureus eiCas9 fusion molecule (e.g., an eiCas9 fused to a transcription activator or repressor domain) to alter (e.g., activate or repress) the POLQ gene. One or more gRNA may be used to target an eiCas9 fusion molecule to a region spanning 500 bp of a transcription start site (TSS) of the POLQ gene.

TABLE II.32B
Exemplary HDR-enhancing gRNAs Targeting a POLQ Gene

| S. aureus | A high level of orthogonality, and PAM is NNGRRT | | | |
|---|---|---|---|---|
| 2nd Tier | 32B | | | |
| gRNA | | | Target Site | |
| Name | DNA Strand | Targeting Domain | Length | Seq ID |
| POLQ-32 | + | AUGUCCGCAGCUGUUGCCAGGC | 22 | 1139 |
| POLQ-33 | + | CAGCGAGAGCCGCUCCUUCCCC | 22 | 1140 |
| POLQ-34 | − | CUCCCGGCCCGCCCCGGAACCA | 22 | 1141 |
| POLQ-35 | + | CUUCCCCACGAGUCUAUGGCUU | 22 | 1142 |
| POLQ-36 | + | UGGCUUGCCCUGAUCGGCCGAG | 22 | 1143 |

[0738] Table II.33A provides exemplary targeting domains of gRNAs to be used with an eiCas9 fusion molecule (e.g., an eiCas9 fused to a transcription activator or repressor domain) to alter (e.g., activate or repress) a gene, e.g., FBXO18 gene. The targeting domains of gRNAs were selected according to the first tier parameters. The targeting domains bind within 500 bp spanning a transcription start site (TSS), e.g., upstream or downstream of a TSS, have a high level of orthogonality and start with a 5′G. It is contemplated herein that in an embodiment the targeting domain hybridizes to the target domain through complementary base pairing. Any of the targeting domains in the table can be used with a S. pyogenes eiCas9 fusion molecule (e.g., an eiCas9 fused to a transcription activator or repressor domain) to alter (e.g., activate or repress) the FBX18 gene. One or more gRNA may be used to target an eiCas9 fusion molecule to a region spanning 500 bp of a transcription start site (TSS) of the FBXO18 gene.

TABLE II.33A
Exemplary HDR-enhancing gRNAs Targeting a FBXO18 Gene

| S. pyogenes | A high level of orthogonality, and starts with a G | | | |
|---|---|---|---|---|
| 1st Tier | 33A | | | |
| gRNA | | | Target Site | |
| Name | DNA Strand | Targeting Domain | Length | Seq ID |
| FBXO18-1 | − | GAAGCGCCCGCCGCCGGAGC | 20 | 1144 |
| FBXO18-2 | − | GACCAAUCGGGACGCGAGAC | 20 | 1145 |
| FBXO18-3 | − | GACCGGAGGGGGCGUGCUGA | 20 | 1146 |
| FBXO18-4 | − | GACGGCCCCCGCGACCAAUC | 20 | 1147 |
| FBXO18-5 | + | GAGCUCGCGGAGGAAGUCGG | 20 | 1148 |
| FBXO18-6 | + | GAGGAAGUCGGCGGGCGUCU | 20 | 1149 |
| FBXO18-7 | − | GCACUGUGGCGCUCCGGACC | 20 | 1150 |
| FBXO18-8 | + | GCGGAGCUCGCGGAGGAAGU | 20 | 1151 |
| FBXO18-9 | − | GGACCCCCCGCGCAGGACCC | 20 | 1152 |
| FBXO18-10 | − | GGAGGGGGCGUGCUGACGGA | 20 | 1153 |
| FBXO18-11 | + | GGCCGUCAGUCCGGCUCCGG | 20 | 1154 |
| FBXO18-12 | + | GGGACGCUGGGCUGAGCGGC | 20 | 1155 |
| FBXO18-13 | + | GGGGGCCGUCAGUCCGGCUC | 20 | 1156 |
| FBXO18-14 | + | GGGUCCUGCGCGGGGGGUCC | 20 | 1157 |
| FBXO18-15 | + | GGUCGCGGGGGCCGUCAGUC | 20 | 1158 |
| FBXO18-16 | + | GUCAGUCCGGCUCCGGCGGC | 20 | 1159 |
| FBXO18-17 | + | GUCCGUCAGCACGCCCCCUC | 20 | 1160 |
| FBXO18-18 | − | GUCUGCGGCCUCACGCACUG | 20 | 1161 |
| FBXO18-19 | + | GUGAGGCCGCAGACGUGGCA | 20 | 1162 |
| FBXO18-20 | + | GUGGGAGGGGCUCCGCCGUG | 20 | 1163 |

[0739] Table II.33B provides exemplary targeting domains of gRNAs to be used with an eiCas9 fusion molecule (e.g., an eiCas9 fused to a transcription activator or repressor domain) to alter (e.g., activate or repress) a gene, e.g., FBXO18 gene. The targeting domains of gRNAs were selected according to the second tier parameters. The targeting domains bind within 500 bp spanning a transcription start site (TSS), e.g., upstream or downstream of a TSS and have a high level of orthogonality. It is contemplated herein that in an embodiment the targeting domain hybridizes to the target domain through complementary base pairing. Any of the targeting domains in the table can be used with a S. pyogenes eiCas9 fusion molecule (e.g., an eiCas9 fused to a transcription activator or repressor domain) to alter (e.g., activate or repress) the FBXO18 gene. One or more gRNA may be used to target an eiCas9 fusion molecule to a region spanning 500 bp of a transcription start site (TSS) of the FBXO18 gene.

TABLE II.33B
Exemplary HDR-enhancing gRNAs Targeting a FBXO18 Gene

| S. pyogenes | A high level of orthogonality | | | |
|---|---|---|---|---|
| 2nd Tier | 33B | | | |
| gRNA | | | Target Site | |
| Name | DNA Strand | Targeting Domain | Length | Seq ID |
| FBXO18-21 | + | AACCUCCGGGGUCCUGCGCG | 20 | 1164 |
| FBXO18-22 | − | AAUCGGGACGCGAGACCGGA | 20 | 1165 |
| FBXO18-23 | + | ACCUCCGGGGUCCUGCGCGG | 20 | 1166 |
| FBXO18-24 | + | AGAGGAGGAGCUCGCUGCCG | 20 | 1167 |
| FBXO18-25 | + | AGCUCGCGGAGGAAGUCGGC | 20 | 1168 |
| FBXO18-26 | + | AGGAAGUCGGCGGGCGUCUC | 20 | 1169 |
| FBXO18-27 | + | AGUGCGUGAGGCCGCAGACG | 20 | 1170 |
| FBXO18-28 | − | AUCGGGACGCGAGACCGGAG | 20 | 1171 |
| FBXO18-29 | − | CAAUCGGGACGCGAGACCGG | 20 | 1172 |
| FBXO18-30 | − | CGCCGCCGGAGCCGGACUGA | 20 | 1173 |
| FBXO18-31 | + | CGCGUCCCGAUUGGUCGCGG | 20 | 1174 |
| FBXO18-32 | + | CGGCGGGCGUCUCGGGCUCC | 20 | 1175 |
| FBXO18-33 | + | CGUCAGUCCGGCUCCGGCGG | 20 | 1176 |
| FBXO18-34 | + | CUCCGGUCUCGCGUCCCGAU | 20 | 1177 |
| FBXO18-35 | + | CUCGCGUCCCGAUUGGUCGC | 20 | 1178 |
| FBXO18-36 | + | UAACCUCCGGGGUCCUGCGC | 20 | 1179 |
| FBXO18-37 | + | UCGCGUCCCGAUUGGUCGCG | 20 | 1180 |
| FBXO18-38 | + | UCUCGCGUCCCGAUUGGUCG | 20 | 1181 |
| FBXO18-39 | − | UGACGGCCCCCGCGACCAAU | 20 | 1182 |
| FBXO18-40 | + | UUAACCUCCGGGGUCCUGCG | 20 | 1183 |

[0740] Table II.34A provides exemplary targeting domains of gRNAs to be used with an eiCas9 fusion molecule (e.g., an eiCas9 fused to a transcription activator or repressor domain) to alter (e.g., activate or repress) a gene, e.g., FBXO18 gene. The targeting domains of gRNAs were selected according to the first tier parameters. The targeting domains bind within 500 bp spanning a transcription start site (TSS), e.g., upstream or downstream of a TSS, have a high level of orthogonality, start with a 5′G and PAM is NNGRRT. It is contemplated herein that in an embodiment the targeting domain hybridizes to the target domain through complementary base pairing. Any of the targeting domains in the table can be used with a S. aureus eiCas9 fusion molecule (e.g., an eiCas9 fused to a transcription activator or repressor domain) to alter (e.g., activate or repress) the FBXO18 gene. One or more gRNA may be used to target an eiCas9 fusion molecule to a region spanning 500 bp of a transcription start site (TSS) of the FBXO18 gene.

TABLE II.34A
Exemplary HDR-enhancing gRNAs Targeting a FBXO18 Gene

| S. aureus | A high level of orthogonality, starts with a G, PAM is NNGRRT | | | |
|---|---|---|---|---|
| 1st Tier | 34A | | | |
| gRNA | | | Target Site | |
| Name | DNA Strand | Targeting Domain | Length | Seq ID |
| FBXO18-41 | + | GCCGUGUGGAAAACUUAACCUC | 22 | 1184 |
| FBXO18-42 | + | GCGGGCCCGGCGGCGGCGGCAG | 22 | 1185 |
| FBXO18-43 | + | GCGUGAGGCCGCAGACGUGGCA | 22 | 1186 |

[0741] Table II.34B provides exemplary targeting domains of gRNAs to be used with an eiCas9 fusion molecule (e.g., an eiCas9 fused to a transcription activator or repressor domain) to alter (e.g., activate or repress) a gene, e.g., FBXO18 gene. The targeting domains of gRNAs were selected according to the second tier parameters. The targeting domains bind within 500 bp spanning a transcription start site (TSS), e.g., upstream or downstream of a TSS, have a high level of orthogonality and PAM is NNGRRT. It is contemplated herein that in an embodiment the targeting domain hybridizes to the target domain through complementary base pairing. Any of the targeting domains in the table can be used with a S. aureus eiCas9 fusion molecule (e.g., an eiCas9 fused to a transcription activator or repressor domain) to alter (e.g., activate or repress) the FBXO18 gene. One or more gRNA may be used to target an eiCas9 fusion molecule to a region spanning 500 bp of a transcription start site (TSS) of the FBXO18 gene.

TABLE II.34B
Exemplary HDR-enhancing gRNAs Targeting a FBXO18 Gene

| S. aureus | A high level of orthogonality, and PAM is NNGRRT | | | |
|---|---|---|---|---|
| 2nd Tier | 34B | | | |
| gRNA | | | Target Site | |
| Name | DNA Strand | Targeting Domain | Length | Seq ID |
| FBXO18-44 | + | CCGGCGGCGGCGGCAGCGGGGU | 22 | 1187 |
| FBXO18-45 | + | UCCUGCGCGGGGGGUCCGGGCC | 22 | 1188 |
| FBXO18-46 | + | UUAACCUCCGGGGUCCUGCGCG | 22 | 1189 |

[0742] Table II.35A provides exemplary targeting domains of gRNAs to be used with an eiCas9 fusion molecule (e.g., an eiCas9 fused to a transcription activator or repressor domain) to alter (e.g., activate or repress) a gene, e.g., RTEL1 gene. The targeting domains of gRNAs were selected according to the first tier parameters. The targeting domains bind within 500 bp spanning a transcription start site (TSS), e.g., upstream or downstream of a TSS, have a high level of orthogonality and start with a 5′G. It is contemplated herein that in an embodiment the targeting domain hybridizes to the target domain through complementary base pairing. Any of the targeting domains in the table can be used with a S. pyogenes eiCas9 fusion molecule (e.g., an eiCas9 fused to a transcription activator or repressor domain) to alter (e.g., activate or repress) the RTEL1 gene. One or more gRNA may be used to target an eiCas9 fusion molecule to a region spanning 500 bp of a transcription start site (TSS) of the RTEL1 gene.

TABLE II.35A
Exemplary HDR-enhancing gRNAs Targeting a RTEL1 Gene

| S. pyogenes | A high level of orthogonality, and starts with a G | | | |
|---|---|---|---|---|
| 1st Tier | 35A | | | |
| gRNA | | | Target Site | |
| Name | DNA Strand | Targeting Domain | Length | Seq ID |
| RTEL1-1 | − | GAAACUGUUCCCCCGCGGAG | 20 | 1190 |
| RTEL1-2 | + | GAACGCGCAAAACGCCGUGU | 20 | 1191 |
| RTEL1-3 | + | GACGGGUGGCGGCCCUCGAC | 20 | 1192 |
| RTEL1-4 | + | GAGCAGGCGGACCCCCUCCG | 20 | 1193 |
| RTEL1-5 | − | GAGGGGGUCCGCCUGCUCUU | 20 | 1194 |
| RTEL1-6 | − | GCACUUCCGCCCCCCACUUC | 20 | 1195 |
| RTEL1-7 | + | GCAGGCGGACCCCCUCCGCG | 20 | 1196 |
| RTEL1-8 | − | GCCUGCUCUUCGGCUCCUCC | 20 | 1197 |
| RTEL1-9 | + | GCCUGGAGGAGCCGAAGAGC | 20 | 1198 |
| RTEL1-10 | − | GCGGCGAACCUUCCAGAACC | 20 | 1199 |
| RTEL1-11 | + | GCGGGGGAACAGUUUCCGCC | 20 | 1200 |
| RTEL1-12 | + | GCUGGCUGACAGCUGGGGAC | 20 | 1201 |
| RTEL1-13 | − | GGAAACUGUUCCCCCGCGGA | 20 | 1202 |
| RTEL1-14 | + | GGAGUCGGUUGAGUUCCUGA | 20 | 1203 |
| RTEL1-15 | + | GGCUGACAGCUGGGGACGGG | 20 | 1204 |
| RTEL1-16 | + | GGGAGCACAAAGCAACGGAC | 20 | 1205 |
| RTEL1-17 | − | GGUCCGUUGCUUUGUGCUCC | 20 | 1206 |
| RTEL1-18 | + | GUGGGGGGCGGAAGUGCAGU | 20 | 1207 |
| RTEL1-19 | + | GUUGAGUUCCUGAGGGACCC | 20 | 1208 |

[0743] Table II.35B provides exemplary targeting domains of gRNAs to be used with an eiCas9 fusion molecule (e.g., an eiCas9 fused to a transcription activator or repressor domain) to alter (e.g., activate or repress) a gene, e.g., RTEL1 gene. The targeting domains of gRNAs were selected according to the second tier parameters. The targeting domains bind within 500 bp spanning a transcription start site (TSS), e.g., upstream or downstream of a TSS and have a high level of orthogonality. It is contemplated herein that in an embodiment the targeting domain hybridizes to the target domain through complementary base pairing. Any of the targeting domains in the table can be used with a S. pyogenes eiCas9 fusion molecule (e.g., an eiCas9 fused to a transcription activator or repressor domain) to alter (e.g., activate or repress) the RTEL1 gene. One or more gRNA may be used to target an eiCas9 fusion molecule to a region spanning 500 bp of a transcription start site (TSS) of the RTEL1 gene.

TABLE II.35B
Exemplary HDR-enhancing gRNAs Targeting a RTEL1 Gene

| S. pyogenes | | | | |
|---|---|---|---|---|
| | A high level of orthogonality | | | |
| 2nd Tier | 35B | | | |
| gRNA | | | Target Site | |
| Name | DNA Strand | Targeting Domain | Length | Seq ID |
| RTEL1-20 | + | AAAACGCCGUGUAGGCCUGG | 20 | 1209 |
| RTEL1-21 | − | AAACUGUUCCCCCGCGGAGG | 20 | 1210 |
| RTEL1-22 | + | AAAGCAACGGACCGGAAGUG | 20 | 1211 |
| RTEL1-23 | + | AACGGACCGGAAGUGGGGGG | 20 | 1212 |
| RTEL1-24 | − | AACUCAACCGACUCCAGUCG | 20 | 1213 |
| RTEL1-25 | + | ACAAAGCAACGGACCGGAAG | 20 | 1214 |
| RTEL1-26 | − | ACUCAACCGACUCCAGUCGA | 20 | 1215 |
| RTEL1-27 | + | ACUCUGAGCUGGCUGACAGC | 20 | 1216 |
| RTEL1-28 | + | AGCAACGGACCGGAAGUGGG | 20 | 1217 |
| RTEL1-29 | − | AGCCAGCUCAGAGUUUUCGC | 20 | 1218 |
| RTEL1-30 | + | CAAAGCAACGGACCGGAAGU | 20 | 1219 |
| RTEL1-31 | + | CGCAAAACGCCGUGUAGGCC | 20 | 1220 |
| RTEL1-32 | − | CGCGGCGAACCUUCCAGAAC | 20 | 1221 |
| RTEL1-33 | + | CGCGGGGGAACAGUUUCCGC | 20 | 1222 |
| RTEL1-34 | − | CGGAAACUGUUCCCCCGCGG | 20 | 1223 |
| RTEL1-35 | − | CGGCGGAAACUGUUCCCCCG | 20 | 1224 |
| RTEL1-36 | + | CGGUUCUGGAAGGUUCGCCG | 20 | 1225 |
| RTEL1-37 | − | CGUUUUGCGCGUUCUGUGUC | 20 | 1226 |
| RTEL1-38 | + | UGCCCGCGAAAACUCUGAGC | 20 | 1227 |
| RTEL1-39 | + | UUCCUGAGGGACCCCGGUUC | 20 | 1228 |

[0744] Table II.36A provides exemplary targeting domains of gRNAs to be used with an eiCas9 fusion molecule (e.g., an eiCas9 fused to a transcription activator or repressor domain) to alter (e.g., activate or repress) a gene, e.g., RTEL1 gene. The targeting domains of gRNAs were selected according to the first tier parameters. The targeting domains bind within 500 bp spanning a transcription start site (TSS), e.g., upstream or downstream of a TSS, have a high level of orthogonality, start with a 5′G and PAM is NNGRRT. It is contemplated herein that in an embodiment the targeting domain hybridizes to the target domain through complementary base pairing. Any of the targeting domains in the table can be used with a S. aureus eiCas9 fusion molecule (e.g., an eiCas9 fused to a transcription activator or repressor domain) to alter (e.g., activate or repress) the RTEL1 gene. One or more gRNA may be used to target an eiCas9 fusion molecule to a region spanning 500 bp of a transcription start site (TSS) of the RTEL1 gene.

TABLE II.36A
Exemplary HDR-enhancing gRNAs Targeting a RTEL1 Gene

| S. aureus | A high level of orthogonality, starts with a G, PAM is NNGRRT | | | |
|---|---|---|---|---|
| 1st Tier | 36A | | | |
| gRNA | | | Target Site | |
| Name | DNA Strand | Targeting Domain | Length | Seq ID |
| RTEL1-40 | − | GCGGAAACUGUUCCCCCGCGGA | 22 | 1229 |
| RTEL1-41 | + | GGCGGCCCUCGACUGGAGUCGG | 22 | 1230 |
| RTEL1-42 | + | GGGACGGGUGGCGGCCCUCGAC | 22 | 1231 |

[0745] Table II.36B provides exemplary targeting domains of gRNAs to be used with an eiCas9 fusion molecule (e.g., an eiCas9 fused to a transcription activator or repressor domain) to alter (e.g., activate or repress) a gene, e.g., RTEL1 gene. The targeting domains of gRNAs were selected according to the second tier parameters. The targeting domains bind within 500 bp spanning a transcription start site (TSS), e.g., upstream or downstream of a TSS, have a high level of orthogonality and PAM is NNGRRT. It is contemplated herein that in an embodiment the targeting domain hybridizes to the target domain through complementary base pairing. Any of the targeting domains in the table can be used with a S. aureus eiCas9 fusion molecule (e.g., an eiCas9 fused to a transcription activator or repressor domain) to alter (e.g., activate or repress) the RTEL1 gene. One or more gRNA may be used to target an eiCas9 fusion molecule to a region spanning 500 bp of a transcription start site (TSS) of the RTEL1 gene.

TABLE II.36B
Exemplary HDR-enhancing gRNAs Targeting a RTEL1 Gene

| S. aureus | A high level of orthogonality, and PAM is NNGRRT | | | |
|---|---|---|---|---|
| 2nd Tier | 36B | | | |
| | | | Target Site | |
| gRNA Name | DNA Strand | Targeting Domain | Length | Seq ID |
| RTEL1-43 | − | CGUCCCCAGCUGUCAGCCAGCU | 22 | 1232 |
| RTEL1-44 | + | CUGAGCUGGCUGACAGCUGGGG | 22 | 1233 |
| RTEL1-45 | − | UCCGCGGCGAACCUUCCAGAAC | 22 | 1234 |

[0746] Table II.37A provides exemplary targeting domains of gRNAs to be used with an eiCas9 fusion molecule (e.g., an eiCas9 fused to a transcription activator or repressor domain) to alter (e.g., activate or repress) a gene, e.g., PARPBP gene. The targeting domains of gRNAs were selected according to the first tier parameters. The targeting domains bind within 500 bp spanning a transcription start site (TSS), e.g., upstream or downstream of a TSS, have a high level of orthogonality and start with a 5′G. It is contemplated herein that in an embodiment the targeting domain hybridizes to the target domain through complementary base pairing. Any of the targeting domains in the table can be used with a S. pyogenes eiCas9 fusion molecule (e.g., an eiCas9 fused to a transcription activator or repressor domain) to alter (e.g., activate or repress) the PARPBP gene. One or more gRNA may be used to target an eiCas9 fusion molecule to a region spanning 500 bp of a transcription start site (TSS) of the PARPBP gene.

TABLE II.37A
Exemplary HDR-enhancing gRNAs Targeting a PARPBP Gene

| | A high level of orthogonality, and starts with a G | | | |
|---|---|---|---|---|
| S. pyogenes | 37A | | | |
| 1st Tier | | | Target Site | |
| gRNA Name | DNA Strand | Targeting Domain | Length | Seq ID |
| PARPBP-1 | − | GAAUACAGUUCAAACCUCGC | 20 | 1235 |
| PARPBP-2 | − | GACGCGAGACUUACGUGAUU | 20 | 1236 |
| PARPBP-3 | + | GAGCGCAGCGAUUGGCUCCC | 20 | 1237 |
| PARPBP-4 | + | GAGGCAGGCUGGUCUUCCUU | 20 | 1238 |
| PARPBP-5 | + | GAGGUUUGAACUGUAUUCAG | 20 | 1239 |
| PARPBP-6 | + | GCAUUUUUAAGUGGUGAUUC | 20 | 1240 |
| PARPBP-7 | + | GCCGCGGGAGGGCAUCCCGU | 20 | 1241 |
| PARPBP-8 | + | GCGACUGCGGCGGCCGCGGG | 20 | 1242 |
| PARPBP-9 | − | GCGCGUCGCGGCAGCCCCCA | 20 | 1243 |
| PARPBP-10 | + | GCGGCGACUGCGGCGGCCGC | 20 | 1244 |
| PARPBP-11 | − | GCUGCGCUCGCCCUCCGACC | 20 | 1245 |
| PARPBP-12 | + | GGCAGGCUGGUCUUCCUUGG | 20 | 1246 |
| PARPBP-13 | + | GGCGACAGCGGCGACUGCGG | 20 | 1247 |
| PARPBP-14 | + | GGCUCCCGGGGCCUCCCGCG | 20 | 1248 |
| PARPBP-15 | + | GGCUCUGCUUCCGGGUCGGA | 20 | 1249 |
| PARPBP-16 | + | GGGGCUGCCGCGACGCGCUG | 20 | 1250 |
| PARPBP-17 | − | GUGUGCGGAAGGAUCCCCAA | 20 | 1251 |

[0747] Table II.37B provides exemplary targeting domains of gRNAs to be used with an eiCas9 fusion molecule (e.g., an eiCas9 fused to a transcription activator or repressor domain) to alter (e.g., activate or repress) a gene, e.g., PARPBP gene. The targeting domains of gRNAs were selected according to the second tier parameters. The targeting domains bind within 500 bp spanning a transcription start site (TSS), e.g., upstream or downstream of a TSS and have a high level of orthogonality. It is contemplated herein that in an embodiment the targeting domain hybridizes to the target domain through complementary base pairing. Any of the targeting domains in the table can be used with a S. pyogenes eiCas9 fusion molecule (e.g., an eiCas9 fused to a transcription activator or repressor domain) to alter (e.g., activate or repress) the PARPBP gene. One or more gRNA may be used to target an eiCas9 fusion molecule to a region spanning 500 bp of a transcription start site (TSS) of the PARPBP gene.

TABLE II.37B
Exemplary HDR-enhancing gRNAs Targeting a PARPBP Gene

| | A high level of orthogonality | | | |
|---|---|---|---|---|
| S. pyogenes | 37B | | | |
| 2nd Tier | | | Target Site | |
| gRNA Name | DNA Strand | Targeting Domain | Length | Seq ID |
| PARPBP-18 | − | AAGACGUACUCUUCAGUGUG | 20 | 1252 |
| PARPBP-19 | − | ACGCGAGACUUACGUGAUUA | 20 | 1253 |
| PARPBP-20 | + | ACGCGCUGUGGCUCUGCUUC | 20 | 1254 |
| PARPBP-21 | + | ACUGUAUUCAGCGGCGACAG | 20 | 1255 |
| PARPBP-22 | − | AGCAGAGCCACAGCGCGUCG | 20 | 1256 |
| PARPBP-23 | + | AGCGCAGCGAUUGGCUCCCG | 20 | 1257 |
| PARPBP-24 | + | CACACUGAAGAGUACGUCUU | 20 | 1258 |
| PARPBP-25 | − | CCCAACGGGAUGCCCUCCCG | 20 | 1259 |
| PARPBP-26 | + | CCGCGGGAGGGCAUCCCGUU | 20 | 1260 |
| PARPBP-27 | + | CGAGCGCAGCGAUUGGCUCC | 20 | 1261 |
| PARPBP-28 | − | CGCGAGACUUACGUGAUUAG | 20 | 1262 |
| PARPBP-29 | + | CGCGGGAGGGCAUCCCGUUG | 20 | 1263 |
| PARPBP-30 | + | CGGAGGGCGAGCGCAGCGAU | 20 | 1264 |
| PARPBP-31 | − | CGUACUCUUCAGUGUGCGGA | 20 | 1265 |
| PARPBP-32 | − | UACAGUUCAAACCUCGCGGG | 20 | 1266 |
| PARPBP-33 | − | UCAAACCUCGCGGGAGGCCC | 20 | 1267 |
| PARPBP-34 | − | UCACCACUUAAAAAUGCGAC | 20 | 1268 |
| PARPBP-35 | − | UGAAUACAGUUCAAACCUCG | 20 | 1269 |
| PARPBP-36 | + | UGCCCUGUCGCAUUUUUAAG | 20 | 1270 |
| PARPBP-37 | − | UGUGCGGAAGGAUCCCCAAC | 20 | 1271 |

[0748] Table II.38A provides exemplary targeting domains of gRNAs to be used with an eiCas9 fusion molecule (e.g., an eiCas9 fused to a transcription activator or repressor domain) to alter (e.g., activate or repress) a gene, e.g., PARPBP gene. The targeting domains of gRNAs were selected according to the first tier parameters. The targeting domains bind within 500 bp spanning a transcription start site (TSS), e.g., upstream or downstream of a TSS, have a high level of orthogonality, start with a 5′G and PAM is NNGRRT. It is contemplated herein that in an embodiment the targeting domain hybridizes to the target domain through complementary base pairing. Any of the targeting domains in the table can be used with a S. aureus eiCas9 fusion molecule (e.g., an eiCas9 fused to a transcription activator or repressor domain) to alter (e.g., activate or repress) the PARPBP gene. One or more gRNA may be used to target an eiCas9 fusion molecule to a region spanning 500 bp of a transcription start site (TSS) of the PARPBP gene.

TABLE II.38A
Exemplary HDR-enhancing gRNAs Targeting a PARPBP Gene

| | A high level of orthogonality, | | | |
|---|---|---|---|---|
| | starts with a G, PAM is NNGRRT | | | |
| S. aureus | 38A | | | |
| 1st Tier | | | Target Site | |
| gRNA Name | DNA Strand | Targeting Domain | Length | Seq ID |
| PARPBP-38 | − | GCCGCAGUCGCCGCUGUCGCCG | 22 | 1272 |
| PARPBP-39 | + | GCGACGCGCUGUGGCUCUGCUU | 22 | 1273 |
| PARPBP-40 | + | GGCCGCGGGAGGGCAUCCCGUU | 22 | 1274 |

[0749] Table II.38B provides exemplary targeting domains of gRNAs to be used with an eiCas9 fusion molecule (e.g., an eiCas9 fused to a transcription activator or repressor domain) to alter (e.g., activate or repress) a gene, e.g., PARPBP gene. The targeting domains of gRNAs were selected according to the second tier parameters. The targeting domains bind within 500 bp spanning a transcription start site (TSS), e.g., upstream or downstream of a TSS, have a high level of orthogonality and PAM is NNGRRT. It is contemplated herein that in an embodiment the targeting domain hybridizes to the target domain through complementary base pairing. Any of the targeting domains in the table can be used with a S. aureus eiCas9 fusion molecule (e.g., an eiCas9 fused to a transcription activator or repressor domain) to alter (e.g., activate or repress) the PARPBP gene. One or more gRNA may be used to target an eiCas9 fusion molecule to a region spanning 500 bp of a transcription start site (TSS) of the PARPBP gene.

TABLE II.38B
Exemplary HDR-enhancing gRNAs Targeting a PARPBP Gene

| | A high level of orthogonality, and PAM is NNGRRT | | | |
|---|---|---|---|---|
| S. aureus | 38B | | | |
| 2nd Tier | | | Target Site | |
| gRNA Name | DNA Strand | Targeting Domain | Length | Seq ID |
| PARPBP-41 | − | AGACGUACUCUUCAGUGUGCGG | 22 | 1275 |
| PARPBP-42 | − | CAGACGCGAGACUUACGUGAUU | 22 | 1276 |
| PARPBP-43 | − | CAGUGUGCGGAAGGAUCCCCAA | 22 | 1277 |
| PARPBP-44 | + | CCGCACACUGAAGAGUACGUCU | 22 | 1278 |
| PARPBP-45 | + | UUGGGGAUCCUUCCGCACACUG | 22 | 1279 |

[0750] Table II.39A provides exemplary targeting domains of gRNAs to be used with an eiCas9 fusion molecule (e.g., an eiCas9 fused to a transcription activator or repressor domain) to alter (e.g., activate or repress) a gene, e.g., UIMC1 gene. The targeting domains of gRNAs were selected according to the first tier parameters. The targeting domains bind within 500 bp spanning a transcription start site (TSS), e.g., upstream or downstream of a TSS, have a high level of orthogonality and start with a 5′G. It is contemplated herein that in an embodiment the targeting domain hybridizes to the target domain through complementary base pairing. Any of the targeting domains in the table can be used with a S. pyogenes eiCas9 fusion molecule (e.g., an eiCas9 fused to a transcription activator or repressor domain) to alter (e.g., activate or repress) the UIMC1 gene. One or more gRNA may be used to target an eiCas9 fusion molecule to a region spanning 500 bp of a transcription start site (TSS) of the UIMC1 gene.

TABLE II.39A
Exemplary HDR-enhancing gRNAs Targeting a UIMC1 Gene

| | A high level of orthogonality, and starts with a G | | | |
|---|---|---|---|---|
| S. pyogenes | 39A | | | |
| 1st Tier | | | Target Site | |
| gRNA Name | DNA Strand | Targeting Domain | Length | Seq ID |
| UIMC1-1 | − | GAAUCCGCCCCGGAAUCGGG | 20 | 1280 |
| UIMC1-2 | + | GACCGGCCAUUACUGGUGCC | 20 | 1281 |
| UIMC1-3 | − | GACUUAACCAACCCCCGCCG | 20 | 1282 |
| UIMC1-4 | − | GCACCAGUAAUGGCCGGUCC | 20 | 1283 |
| UIMC1-5 | − | GCCACACGUUGGGAGCGCGG | 20 | 1284 |
| UIMC1-6 | − | GCCGCCACACGUUGGGAGCG | 20 | 1285 |
| UIMC1-7 | − | GCGUCGCGAGAGACACACCC | 20 | 1286 |
| UIMC1-8 | − | GGACGUACCAACUGCGCGGG | 20 | 1287 |
| UIMC1-9 | − | GGCGGCGGGUACUCACUCGC | 20 | 1288 |
| UIMC1-10 | + | GGGGUGUGUCUCUCGCGACG | 20 | 1289 |
| UIMC1-11 | + | GGGUGUGUCUCUCGCGACGC | 20 | 1290 |
| UIMC1-12 | − | GGUCGCGAGCCGCCACACGU | 20 | 1291 |
| UIMC1-13 | + | GGUGUGUCUCUCGCGACGCG | 20 | 1292 |
| UIMC1-14 | − | GUAGACCUUCUCCGGGUUGC | 20 | 1293 |
| UIMC1-15 | + | GUCCCUCCGGACGCCGAAGU | 20 | 1294 |
| UIMC1-16 | + | GUCCGCGGCCCGCUACUCUC | 20 | 1295 |
| UIMC1-17 | − | GUCGCGAGCCGCCACACGUU | 20 | 1296 |
| UIMC1-18 | + | GUCUCUCGCGACGCGGGGGU | 20 | 1297 |
| UIMC1-19 | + | GUGUGGCGGCUCGCGACCCC | 20 | 1298 |
| UIMC1-20 | + | GUGUGUCUCUCGCGACGCGG | 20 | 1299 |

[0751] Table II.39B provides exemplary targeting domains of gRNAs to be used with an eiCas9 fusion molecule (e.g., an eiCas9 fused to a transcription activator or repressor domain) to alter (e.g., activate or repress) a gene, e.g., UIMC1 gene. The targeting domains of gRNAs were selected according to the second tier parameters. The targeting domains bind within 500 bp spanning a transcription start site (TSS), e.g., upstream or downstream of a TSS and have a high level of orthogonality. It is contemplated herein that in an embodiment the targeting domain hybridizes to the target domain through complementary base pairing. Any of the targeting domains in the table can be used with a S. pyogenes eiCas9 fusion molecule (e.g., an eiCas9 fused to a transcription activator or repressor domain) to alter (e.g., activate or repress) the UIMC1 gene. One or more gRNA may be used to target an eiCas9 fusion molecule to a region spanning 500 bp of a transcription start site TS S) of the UIMC1 gene.

TABLE II.39B
Exemplary HDR-enhancing gRNAs Targeting a UIMC1 Gene

| | A high level of orthogonality | | | |
|---|---|---|---|---|
| S. pyogenes | 398 | | | |
| 2nd Tier | | | Target Site | |
| gRNA Name | DNA Strand | Targeting Domain | Length | Seq ID |
| UIMC1-21 | − | AACCCGGCACCAGUAAUGGC | 20 | 1300 |
| UIMC1-22 | − | AAUCCGCCCCGGAAUCGGGA | 20 | 1301 |
| UIMC1-23 | + | ACGCCGGGACCGGCCAUUAC | 20 | 1302 |
| UIMC1-24 | − | ACUUAACCAACCCCCGCCGC | 20 | 1303 |
| UIMC1-25 | − | AGCCCACUUCGGCGUCCGGA | 20 | 1304 |
| UIMC1-26 | + | AGGUAGGCCUCUCCCGACGC | 20 | 1305 |
| UIMC1-27 | + | CCCGAUUCCGGGGCGGAUUC | 20 | 1306 |
| UIMC1-28 | + | CCCGCGCAGUUGGUACGUCC | 20 | 1307 |
| UIMC1-29 | + | CCGCCCCGAGAGCGUGUCUC | 20 | 1308 |
| UIMC1-30 | − | CCGGAAUCCGCCCCGGAAUC | 20 | 1309 |
| UIMC1-31 | − | CCGGGACGUACCAACUGCGC | 20 | 1310 |
| UIMC1-32 | + | CGCAGUUGGUACGUCCCGGA | 20 | 1311 |
| UIMC1-33 | + | CGGCCCGCUACUCUCCGGGA | 20 | 1312 |
| UIMC1-34 | + | CGUCCCGGAUGGCUCCCCCG | 20 | 1313 |
| UIMC1-35 | − | UAAUGGCCGGUCCCGGCGUC | 20 | 1314 |
| UIMC1-36 | − | UCCGGAAUCCGCCCCGGAAU | 20 | 1315 |
| UIMC1-37 | + | UCCGGACGCCGAAGUGGGCU | 20 | 1316 |
| UIMC1-38 | − | UCCGGGACGUACCAACUGCG | 20 | 1317 |
| UIMC1-39 | + | UGUCUCUCGCGACGCGGGGG | 20 | 1318 |
| UIMC1-40 | − | UUAACCAACCCCCGCCGCGG | 20 | 1319 |

[0752] Table II.40A provides exemplary targeting domains of gRNAs to be used with an eiCas9 fusion molecule (e.g., an eiCas9 fused to a transcription activator or repressor domain) to alter (e.g., activate or repress) a gene, e.g., UIMC1 gene. The targeting domains of gRNAs were selected according to the first tier parameters. The targeting domains bind within 500 bp spanning a transcription start site (TSS), e.g., upstream or downstream of a TSS, have a high level of orthogonality, start with a 5′G and PAM is NNGRRT. It is contemplated herein that in an embodiment the targeting domain hybridizes to the target domain through complementary base pairing. Any of the targeting domains in the table can be used with a S. aureus eiCas9 fusion molecule (e.g., an eiCas9 fused to a transcription activator or repressor domain) to alter (e.g., activate or repress) the UIMC1 gene. One or more gRNA may be used to target an eiCas9 fusion molecule to a region spanning 500 bp of a transcription start site (TSS) of the UIMC1 gene.

TABLE II.40A
Exemplary HDR-enhancing gRNAs Targeting a UIMC1 Gene

| | A high level of orthogonality, | | | |
|---|---|---|---|---|
| | starts with a G, PAM is NNGRRT | | | |
| S. aureus | 40A | | | |
| 1st Tier | | | Target Site | |
| gRNA Name | DNA Strand | Targeting Domain | Length | Seq ID |
| UIMC1-41 | − | GCGUCGGGAAGCGCCCCUCCCG | 22 | 1320 |
| UIMC1-42 | + | GCUGGCCUUGCCGAAGUCGGGG | 22 | 1321 |
| UIMC1-43 | + | GUCUACAGAGCGGCCUGCGCCA | 22 | 1322 |

[0753] Table II.40B provides exemplary targeting domains of gRNAs to be used with an eiCas9 fusion molecule (e.g., an eiCas9 fused to a transcription activator or repressor domain) to alter (e.g., activate or repress) a gene, e.g., UIMC1 gene. The targeting domains of gRNAs were selected according to the second tier parameters. The targeting domains bind within 500 bp spanning a transcription start site (TSS), e.g., upstream or downstream of a TSS, have a high level of orthogonality and PAM is NNGRRT. It is contemplated herein that in an embodiment the targeting domain hybridizes to the target domain through complementary base pairing. Any of the targeting domains in the table can be used with a S. aureus eiCas9 fusion molecule (e.g., an eiCas9 fused to a transcription activator or repressor domain) to alter (e.g., activate or repress) the UIMC1 gene. One or more gRNA may be used to target an eiCas9 fusion molecule to a region spanning 500 bp of a transcription start site (TSS) of the UIMC1 gene.

TABLE II.40B
Exemplary HDR-enhancing gRNAs Targeting a UIMC1 Gene

| | A high level of orthogonality, and PAM is NNGRRT | | | |
|---|---|---|---|---|
| S. aureus | 40B | | | |
| 2nd Tier | | | Target Site | |
| gRNA Name | DNA Strand | Targeting Domain | Length | Seq ID |
| UIMC1-44 | + | ACAGAGCGGCCUGCGCCAGCGA | 22 | 1323 |
| UIMC1-45 | − | AGUAAUGGCCGGUCCCGGCGUC | 22 | 1324 |
| UIMC1-46 | − | CAGGCCGCUCUGUAGACCUUCU | 22 | 1325 |
| UIMC1-47 | + | CCCUGCCUCCUUUUCUUCCUCA | 22 | 1326 |
| UIMC1-48 | − | CCGGAAUCCGCCCCGGAAUCGG | 22 | 1327 |
| UIMC1-49 | + | CCGGGACCGGCCAUUACUGGUG | 22 | 1328 |
| UIMC1-50 | + | CCGGGGCGGCCCUUCCUGAUGC | 22 | 1329 |
| UIMC1-51 | + | CCUCCCGCGCAGUUGGUACGUC | 22 | 1330 |
| UIMC1-52 | + | CCUCCGGACGCCGAAGUGGGCU | 22 | 1331 |
| UIMC1-53 | + | CGGGGCUGGCCUUGCCGAAGUC | 22 | 1332 |
| UIMC1-54 | + | CGGGGUGUGUCUCUCGCGACGC | 22 | 1333 |
| UIMC1-55 | + | CUGGGACCCUCCCGAUUCCGGG | 22 | 1334 |
| UIMC1-56 | + | UCCCGGAUGGCUCCCCCGCGGC | 22 | 1335 |
| UIMC1-57 | − | UCCCGGCGUCCGGAAUCCGCCC | 22 | 1336 |
| UIMC1-58 | − | UGAGGAAGAAAAGGAGGCAGGG | 22 | 1337 |
| UIMC1-59 | − | UGGGCGGAGCUGUGCGCAGGCG | 22 | 1338 |
| UIMC1-60 | − | UGUAGACCUUCUCCGGGUUGCC | 22 | 1339 |

[0754] Table II.41A provides exemplary targeting domains of gRNAs to be used with an eiCas9 fusion molecule (e.g., an eiCas9 fused to a transcription activator or repressor domain) to alter (e.g., activate or repress) a gene, e.g., RAD52 gene. The targeting domains of gRNAs were selected according to the first tier parameters. The targeting domains bind within 500 bp spanning a transcription start site (TSS), e.g., upstream or downstream of a TSS, have a high level of orthogonality and start with a 5′G. It is contemplated herein that in an embodiment the targeting domain hybridizes to the target domain through complementary base pairing. Any of the targeting domains in the table can be used with a S. pyogenes eiCas9 fusion molecule (e.g., an eiCas9 fused to a transcription activator or repressor domain) to alter (e.g., activate or repress) the RAD52 gene. One or more gRNA may be used to target an eiCas9 fusion molecule to a region spanning 500 bp of a transcription start site (TSS) of the RAD52 gene.

TABLE II.41A
Exemplary HDR-enhancing gRNAs Targeting a RAD52 Gene

| | A high level of orthogonality, and starts with a G | | | |
|---|---|---|---|---|
| S. pyogenes | 41A | | | |
| 1st Tier | | | Target Site | |
| gRNA Name | DNA Strand | Targeting Domain | Length | Seq ID |
| RAD52-1 | − | GAACCCACGCCCAGCGCCGG | 20 | 1340 |
| RAD52-2 | − | GAACCGUAAAUCAAGUCGGA | 20 | 1341 |
| RAD52-3 | − | GAAGGAACCGUAAAUCAAGU | 20 | 1342 |
| RAD52-4 | − | GAAGGGUGCGCGAGCGUCUC | 20 | 1343 |
| RAD52-5 | + | GAGAGCGGCUUCCCCCGGGG | 20 | 1344 |
| RAD52-6 | + | GAGGAGAGCGGCUUCCCCCG | 20 | 1345 |
| RAD52-7 | − | GAGGCCGCGCAGAGGAGAAU | 20 | 1346 |
| RAD52-8 | − | GCACACAGGGAGCUCGAUCU | 20 | 1347 |
| RAD52-9 | − | GCAGCCCCAGGUUCUCGACC | 20 | 1348 |
| RAD52-10 | + | GCUGCCCGAGGCGCGUAAGU | 20 | 1349 |
| RAD52-11 | + | GCUUCCGGGUCGAGAACCUG | 20 | 1350 |
| RAD52-12 | − | GGAACCGUAAAUCAAGUCGG | 20 | 1351 |
| RAD52-13 | + | GGAGGAGAGCGGCUUCCCCC | 20 | 1352 |
| RAD52-14 | − | GGAGGCCGCGCAGAGGAGAA | 20 | 1353 |
| RAD52-15 | − | GGCAGCGCGCGGUGCACACA | 20 | 1354 |
| RAD52-16 | + | GGGAGGAGAGCGGCUUCCCC | 20 | 1355 |
| RAD52-17 | − | GGGCAGCGCGCGGUGCACAC | 20 | 1356 |
| RAD52-18 | − | GGGGAAGAGAUCUUAGAUGG | 20 | 1357 |
| RAD52-19 | − | GGUGAACUAGAACAGGCCUC | 20 | 1358 |
| RAD52-20 | + | GGUGGUUCUAGCCGUGGGUG | 20 | 1359 |

[0755] Table II.41B provides exemplary targeting domains of gRNAs to be used with an eiCas9 fusion molecule (e.g., an eiCas9 fused to a transcription activator or repressor domain) to alter (e.g., activate or repress) a gene, e.g., RAD52 gene. The targeting domains of gRNAs were selected according to the second tier parameters. The targeting domains bind within 500 bp spanning a transcription start site (TSS), e.g., upstream or downstream of a TSS and have a high level of orthogonality. It is contemplated herein that in an embodiment the targeting domain hybridizes to the target domain through complementary base pairing. Any of the targeting domains in the table can be used with a S. pyogenes eiCas9 fusion molecule (e.g., an eiCas9 fused to a transcription activator or repressor domain) to alter (e.g., activate or repress) the RAD52 gene. One or more gRNA may be used to target an eiCas9 fusion molecule to a region spanning 500 bp of a transcription start site (TSS) of the RAD52 gene.

TABLE II.41B
Exemplary HDR-enhancing gRNAs Targeting a RAD52 Gene

| | A high level of orthogonality | | | |
|---|---|---|---|---|
| S. pyogenes | 41B | | | |
| 2nd Tier | | | Target Site | |
| gRNA Name | DNA Strand | Targeting Domain | Length | Seq ID |
| RAD52-21 | − | AACCGUAAAUCAAGUCGGAG | 20 | 1360 |
| RAD52-22 | − | ACCCACGGCUAGAACCACCC | 20 | 1361 |
| RAD52-23 | + | AGCUUCCGGGUCGAGAACCU | 20 | 1362 |
| RAD52-24 | − | AGGGAGCUCGAUCUAGGCUA | 20 | 1363 |
| RAD52-25 | − | CACGGCUAGAACCACCCCGG | 20 | 1364 |
| RAD52-26 | + | CAGCUUCCGGGUCGAGAACC | 20 | 1365 |
| RAD52-27 | − | CCACGGCUAGAACCACCCCG | 20 | 1366 |
| RAD52-28 | − | CCCACGGCUAGAACCACCCC | 20 | 1367 |
| RAD52-29 | + | CCCCGGGGUGGUUCUAGCCG | 20 | 1368 |
| RAD52-30 | + | CCCGGGGUGGUUCUAGCCGU | 20 | 1369 |
| RAD52-31 | + | CCGAGGCGCGUAAGUGGGGG | 20 | 1370 |
| RAD52-32 | − | CCUCCCCCACUUACGCGCCU | 20 | 1371 |
| RAD52-33 | − | CGCGAGCGUCUCUGGGAAGA | 20 | 1372 |
| RAD52-34 | + | CGCUGCCCGAGGCGCGUAAG | 20 | 1373 |
| RAD52-35 | − | CUCGAUCUAGGCUAUGGACA | 20 | 1374 |
| RAD52-36 | − | CUUAGAUGGAGGCCGCGCAG | 20 | 1375 |
| RAD52-37 | − | UACGCGCCUCGGGCAGCGCG | 20 | 1376 |
| RAD52-38 | − | UCCGAACCCACGCCCAGCGC | 20 | 1377 |
| RAD52-39 | − | UCGAUCUAGGCUAUGGACAA | 20 | 1378 |
| RAD52-40 | + | UGCCCGAGGCGCGUAAGUGG | 20 | 1379 |

[0756] Table II.42A provides exemplary targeting domains of gRNAs to be used with an eiCas9 fusion molecule (e.g., an eiCas9 fused to a transcription activator or repressor domain) to alter (e.g., activate or repress) a gene, e.g., RAD52 gene. The targeting domains of gRNAs were selected according to the first tier parameters. The targeting domains bind within 500 bp spanning a transcription start site (TSS), e.g., upstream or downstream of a TSS, have a high level of orthogonality, start with a 5′G and PAM is NNGRRT. It is contemplated herein that in an embodiment the targeting domain hybridizes to the target domain through complementary base pairing. Any of the targeting domains in the table can be used with a S. aureus eiCas9 fusion molecule (e.g., an eiCas9 fused to a transcription activator or repressor domain) to alter (e.g., activate or repress) the RAD52 gene. One or more gRNA may be used to target an eiCas9 fusion molecule to a region spanning 500 bp of a transcription start site (TSS) of the RAD52 gene.

TABLE II.42A
Exemplary HDR-enhancing gRNAs Targeting a RAD52 Gene

| | A high level of orthogonality, | | | |
|---|---|---|---|---|
| | starts with a G, PAM is NNGRRT | | | |
| S. aureus | 42A | | | |
| 1st Tier | | | Target Site | |
| gRNA Name | DNA Strand | Targeting Domain | Length | Seq ID |
| RAD52-41 | + | GGAGCGUGGGAAGGCUCAGCUU | 22 | 1380 |
| RAD52-42 | + | GGGGGAGGAGAGCGGCUUCCCC | 22 | 1381 |

[0757] Table II.42B provides exemplary targeting domains of gRNAs to be used with an eiCas9 fusion molecule (e.g., an eiCas9 fused to a transcription activator or repressor domain) to alter (e.g., activate or repress) a gene, e.g., RAD52 gene. The targeting domains of gRNAs were selected according to the second tier parameters. The targeting domains bind within 500 bp spanning a transcription start site (TSS), e.g., upstream or downstream of a TSS, have a high level of orthogonality and PAM is NNGRRT. It is contemplated herein that in an embodiment the targeting domain hybridizes to the target domain through complementary base pairing. Any of the targeting domains in the table can be used with a S. aureus eiCas9 fusion molecule (e.g., an eiCas9 fused to a transcription activator or repressor domain) to alter (e.g., activate or repress) the RAD52 gene. One or more gRNA may be used to target an eiCas9 fusion molecule to a region spanning 500 bp of a transcription start site (TSS) of the RAD52 gene.

TABLE II.42B
Exemplary HDR-enhancing gRNAs Targeting a RAD52 Gene

| | A high level of orthogonality, and PAM is NNGRRT | | | |
|---|---|---|---|---|
| S. aureus | 42B | | | |
| 2nd Tier | | | Target Site | |
| gRNA Name | DNA Strand | Targeting Domain | Length | Seq ID |
| RAD52-43 | − | AGGCCGCGCAGAGGAGAAUGGG | 22 | 1382 |
| RAD52-44 | − | CAGCAUCUCUACGCUGAGACCU | 22 | 1383 |
| RAD52-45 | + | CUGAGGUCUCAGCGUAGAGAUG | 22 | 1384 |
| RAD52-46 | − | CUUAGAUGGAGGCCGCGCAGAG | 22 | 1385 |
| RAD52-47 | + | UUCCCCCGGGGUGGUUCUAGCC | 22 | 1386 |
| RAD52-48 | + | UUUUCCCCCUCCGGCGCUGGGC | 22 | 1387 |

[0758] Table II.43A provides exemplary targeting domains of gRNAs to be used with an eiCas9 fusion molecule (e.g., an eiCas9 fused to a transcription activator or repressor domain) to alter (e.g., activate or repress) a gene, e.g., ERCC1 gene. The targeting domains of gRNAs were selected according to the first tier parameters. The targeting domains bind within 500 bp spanning a transcription start site (TSS), e.g., upstream or downstream of a TSS, have a high level of orthogonality and start with a 5′G. It is contemplated herein that in an embodiment the targeting domain hybridizes to the target domain through complementary base pairing. Any of the targeting domains in the table can be used with a S. pyogenes eiCas9 fusion molecule (e.g., an eiCas9 fused to a transcription activator or repressor domain) to alter (e.g., activate or repress) the ERCC1 gene. One or more gRNA may be used to target an eiCas9 fusion molecule to a region spanning 500 bp of a transcription start site (TSS) of the ERCC1 gene.

TABLE II.43A
Exemplary HDR-enhancing gRNAs Targeting a ERCC1 Gene

| | A high level of orthogonality, and starts with a G | | | |
|---|---|---|---|---|
| S. pyogenes | 43A | | | |
| 1st Tier | | | Target Site | |
| gRNA Name | DNA Strand | Targeting Domain | Length | Seq ID |
| ERCC1-1 | − | GAAAGACUGCAGAGGGAUCG | 20 | 1388 |
| ERCC1-2 | + | GAGCCAAUAGAAUCCGGUGG | 20 | 1389 |
| ERCC1-3 | + | GCACGGACUCGCACAGGACC | 20 | 1390 |
| ERCC1-4 | + | GCCGGAAGUGCUGCGAGCCC | 20 | 1391 |
| ERCC1-5 | + | GCCGGACGAACGGAAGGCGG | 20 | 1392 |
| ERCC1-6 | + | GCCUCUAGCGCUGGGUGUUG | 20 | 1393 |
| ERCC1-7 | + | GCGCGUGGGGGGAAUAGGUG | 20 | 1394 |
| ERCC1-8 | + | GCGGGUGGAGAUUGGCGCCG | 20 | 1395 |
| ERCC1-9 | + | GCGUCCAGAUGCUAGCCUCG | 20 | 1396 |
| ERCC1-10 | − | GGAGAUCCCGGGAGAGCCGU | 20 | 1397 |
| ERCC1-11 | + | GGAGCCAAUAGAAUCCGGUG | 20 | 1398 |
| ERCC1-12 | + | GGCCGGACGAACGGAAGGCG | 20 | 1399 |
| ERCC1-13 | + | GGCGCUGAAACCGUGAGGCC | 20 | 1400 |
| ERCC1-14 | + | GGCGUCCAGAUGCUAGCCUC | 20 | 1401 |
| ERCC1-15 | + | GGCUUUGAAACUUAACAGUU | 20 | 1402 |
| ERCC1-16 | − | GGGAGAUCCCGGGAGAGCCG | 20 | 1403 |
| ERCC1-17 | + | GGGCCGGACGAACGGAAGGC | 20 | 1404 |
| ERCC1-18 | + | GGGCGUCCAGAUGCUAGCCU | 20 | 1405 |
| ERCC1-19 | − | GGUCCUGUGCGAGUCCGUGC | 20 | 1406 |
| ERCC1-20 | + | GUUACAGAGCCUCUAGCGCU | 20 | 1407 |

[0759] Table II.43B provides exemplary targeting domains of gRNAs to be used with an eiCas9 fusion molecule (e.g., an eiCas9 fused to a transcription activator or repressor domain) to alter (e.g., activate or repress) a gene, e.g., ERCC1 gene. The targeting domains of gRNAs were selected according to the second tier parameters. The targeting domains bind within 500 bp spanning a transcription start site (TSS), e.g., upstream or downstream of a TSS and have a high level of orthogonality. It is contemplated herein that in an embodiment the targeting domain hybridizes to the target domain through complementary base pairing. Any of the targeting domains in the table can be used with a S. pyogenes eiCas9 fusion molecule (e.g., an eiCas9 fused to a transcription activator or repressor domain) to alter (e.g., activate or repress) the ERCC1 gene. One or more gRNA may be used to target an eiCas9 fusion molecule to a region spanning 500 bp of a transcription start site (TSS) of the ERCC1 gene.

TABLE II.43B
Exemplary HDR-enhancing gRNAs Targeting a ERCC1 Gene

| | A high level of orthogonality | | | |
|---|---|---|---|---|
| S. pyogenes | 43B | | | |
| 2nd Tier | | | Target Site | |
| gRNA Name | DNA Strand | Targeting Domain | Length | Seq ID |
| ERCC1-21 | + | ACGGAGCCAAUAGAAUCCGG | 20 | 1408 |
| ERCC1-22 | − | AGAUCGCAGGAGAUCCAACU | 20 | 1409 |
| ERCC1-23 | + | AGCCUCGGGGGCCGGACGAA | 20 | 1410 |
| ERCC1-24 | + | AGCCUCUAGCGCUGGGUGUU | 20 | 1411 |
| ERCC1-25 | + | AUAGAAUCCGGUGGGGGCGA | 20 | 1412 |
| ERCC1-26 | − | CCGGAGCUUACGGUUCAGUA | 20 | 1413 |
| ERCC1-27 | + | CGGAGCCAAUAGAAUCCGGU | 20 | 1414 |
| ERCC1-28 | + | CGUCCAGAUGCUAGCCUCGG | 20 | 1415 |
| ERCC1-29 | + | CGUUACAGAGCCUCUAGCGC | 20 | 1416 |
| ERCC1-30 | − | CUACGUUCUCAUCCCGCAGC | 20 | 1417 |
| ERCC1-31 | − | CUCACGGUUUCAGCGCCGCG | 20 | 1418 |
| ERCC1-32 | + | CUCGCGGCGCUGAAACCGUG | 20 | 1419 |
| ERCC1-33 | + | UCACCAGCACGGACUCGCAC | 20 | 1420 |
| ERCC1-34 | − | UCCCCCGCCUUCCGUUCGUC | 20 | 1421 |
| ERCC1-35 | − | UCCGAGAGCUCCAUAGCGUC | 20 | 1422 |
| ERCC1-36 | − | UCGCCCCCACCGGAUUCUAU | 20 | 1423 |
| ERCC1-37 | − | UCGGCAAUGAUUGGCUUCCG | 20 | 1424 |
| ERCC1-38 | + | UCGGGGGCCGGACGAACGGA | 20 | 1425 |
| ERCC1-39 | − | UGGAGGACCGCGGAGGUCGU | 20 | 1426 |
| ERCC1-40 | − | UUCCGUUCGUCCGGCCCCCG | 20 | 1427 |

[0760] Table II.44A provides exemplary targeting domains of gRNAs to be used with an eiCas9 fusion molecule (e.g., an eiCas9 fused to a transcription activator or repressor domain) to alter (e.g., activate or repress) a gene, e.g., ERCC1 gene. The targeting domains of gRNAs were selected according to the first tier parameters. The targeting domains bind within 500 bp spanning a transcription start site (TSS), e.g., upstream or downstream of a TSS, have a high level of orthogonality, start with a 5′G and PAM is NNGRRT. It is contemplated herein that in an embodiment the targeting domain hybridizes to the target domain through complementary base pairing. Any of the targeting domains in the table can be used with a S. aureus eiCas9 fusion molecule (e.g., an eiCas9 fused to a transcription activator or repressor domain) to alter (e.g., activate or repress) the ERCC1 gene. One or more gRNA may be used to target an eiCas9 fusion molecule to a region spanning 500 bp of a transcription start site TS S) of the ERCC1 gene.

TABLE II.44A
Exemplary HDR-enhancing gRNAs Targeting a ERCC1 Gene

| | A high level of orthogonality, | | | |
|---|---|---|---|---|
| | starts with a G, PAM is NNGRRT | | | |
| S. aureus | 44A | | | |
| 1st Tier | | | Target Site | |
| gRNA Name | DNA Strand | Targeting Domain | Length | Seq ID |
| ERCC1-41 | + | GAAACUGAAGCCAAGUCAAUGU | 22 | 1428 |
| ERCC1-42 | + | GAAGCCCUUCCGGACUCCGGGG | 22 | 1429 |
| ERCC1-43 | + | GACCCCCAUCCCACGGCUCUCC | 22 | 1430 |
| ERCC1-44 | − | GAUCCCGGGAGAGCCGUGGGAU | 22 | 1431 |
| ERCC1-45 | + | GCGCCGCGGAAGCCAAUCAUUG | 22 | 1432 |
| ERCC1-46 | − | GCUGACCCAGAAUGGGCAGGUC | 22 | 1433 |
| ERCC1-47 | + | GGAAUAGGUGUGGAAUAAAUGA | 22 | 1434 |
| ERCC1-48 | + | GGACCUGACGCUAUGGAGCUCU | 22 | 1435 |
| ERCC1-49 | + | GGGAAGAGAGGAAGCGCGUGGG | 22 | 1436 |
| ERCC1-50 | + | GGGAUGGUGGGGACGGAGCCAA | 22 | 1437 |
| ERCC1-51 | + | GGGGCCGGACGAACGGAAGGCG | 22 | 1438 |
| ERCC1-52 | − | GGGGGAGCGCCUGACUCAGCCC | 22 | 1439 |
| ERCC1-53 | + | GGGGGGAAUAGGUGUGGAAUAA | 22 | 1440 |

[0761] Table II.44B provides exemplary targeting domains of gRNAs to be used with an eiCas9 fusion molecule (e.g., an eiCas9 fused to a transcription activator or repressor domain) to alter (e.g., activate or repress) a gene, e.g., ERCC1 gene. The targeting domains of gRNAs were selected according to the second tier parameters. The targeting domains bind within 500 bp spanning a transcription start site (TSS), e.g., upstream or downstream of a TSS, have a high level of orthogonality and PAM is NNGRRT. It is contemplated herein that in an embodiment the targeting domain hybridizes to the target domain through complementary base pairing. Any of the targeting domains in the table can be used with a S. aureus eiCas9 fusion molecule (e.g., an eiCas9 fused to a transcription activator or repressor domain) to alter (e.g., activate or repress) the ERCC1 gene. One or more gRNA may be used to target an eiCas9 fusion molecule to a region spanning 500 bp of a transcription start site (TSS) of the ERCC1 gene.

TABLE II.44B
Exemplary HDR-enhancing gRNAs Targeting a ERCC1 Gene

| S. aureus | A high level of orthogonality, and PAM is NNGRRT | | | |
|---|---|---|---|---|
| 2nd Tier | 44B | | | |
| gRNA | | | Target Site | |
| Name | DNA Strand | Targeting Domain | Length | Seq ID |
| ERCC1-54 | + | AAGCGCGUGGGGGGAAUAGGUG | 22 | 1441 |
| ERCC1-55 | + | ACAGGUGCGGGAGGCGGAGACU | 22 | 1442 |
| ERCC1-56 | − | AGACACGUUCCCAGUGCUGACC | 22 | 1443 |
| ERCC1-57 | − | AGCCUCAAGGGAAAGACUGCAG | 22 | 1444 |
| ERCC1-58 | − | AUCGCUCCGCCCCUCGCCCCCA | 22 | 1445 |
| ERCC1-59 | − | AUGGGAGAUCCCGGGAGAGCCG | 22 | 1446 |
| ERCC1-60 | − | CCUCUCUGGCCCCGCUCCCCAG | 22 | 1447 |
| ERCC1-61 | + | CGGAGUUUUGUGGGGGACGGCU | 22 | 1448 |
| ERCC1-62 | − | CUCAGUAAGGAGAGACUUAAGU | 22 | 1449 |
| ERCC1-63 | + | CUUACUGAGAGGAGGGACCAAG | 22 | 1450 |
| ERCC1-64 | − | CUUCCUCUCUUCCCGGUCCUGU | 22 | 1451 |
| ERCC1-65 | + | UCCCAUCCCAGACCUGCCCAUU | 22 | 1452 |
| ERCC1-66 | + | UCCGCGGUCCUCCAGAACCAUA | 22 | 1453 |
| ERCC1-67 | + | UCUGUUCUCCACUGAGCCCUGC | 22 | 1454 |
| ERCC1-68 | + | UGAAGCCAAGUCAAUGUCUGAG | 22 | 1455 |
| ERCC1-69 | + | UGGCGUUACAGAGCCUCUAGCG | 22 | 1456 |
| ERCC1-70 | − | UGGGAGGAGAGAGAUGUGGCCU | 22 | 1457 |
| ERCC1-71 | + | UGUGAGUGGGGGGUUCCUGCUG | 22 | 1458 |
| ERCC1-72 | − | UUACUGAGCGCUUCUGUGUGCC | 22 | 1459 |
| ERCC1-73 | + | UUGUGGGGGACGGCUGUGAGUG | 22 | 1460 |

[0762] Table II.45A provides exemplary targeting domains of gRNAs to be used with an eiCas9 fusion molecule (e.g., an eiCas9 fused to a transcription activator or repressor domain) to alter (e.g., activate or repress) a gene, e.g., ERCC4 gene. The targeting domains of gRNAs were selected according to the first tier parameters. The targeting domains bind within 500 bp spanning a transcription start site (TSS), e.g., upstream or downstream of a TSS, have a high level of orthogonality and start with a 5′G. It is contemplated herein that in an embodiment the targeting domain hybridizes to the target domain through complementary base pairing. Any of the targeting domains in the table can be used with a S. pyogenes eiCas9 fusion molecule (e.g., an eiCas9 fused to a transcription activator or repressor domain) to alter (e.g., activate or repress) the ERCC4 gene. One or more gRNA may be used to target an eiCas9 fusion molecule to a region spanning 500 bp of a transcription start site (TSS) of the ERCC4 gene.

TABLE II.45A
Exemplary HDR-enhancing gRNAs Targeting a ERCC4 Gene

| S. pyogenes | A high level of orthogonality, and starts with a G | | | |
|---|---|---|---|---|
| 1st Tier | 45A | | | |
| gRNA | | | Target Site | |
| Name | DNA Strand | Targeting Domain | Length | Seq ID |
| ERCC4-1 | + | GAAGAGCUUCCAUGGAGUCA | 20 | 1461 |
| ERCC4-2 | − | GACUCCAUGGAAGCUCUUCC | 20 | 1462 |
| ERCC4-3 | − | GAGAGCCGAGUCCGAGAGGA | 20 | 1463 |
| ERCC4-4 | + | GAUUGCCAUGGCGCCGCUGC | 20 | 1464 |
| ERCC4-5 | − | GCCAUGGCAAUCCGUCGAGC | 20 | 1465 |
| ERCC4-6 | − | GCCGACUCCUAGUGGAGAGU | 20 | 1466 |
| ERCC4-7 | + | GCCGGCUCGACGGAUUGCCA | 20 | 1467 |
| ERCC4-8 | + | GCCUACUCUCCACUAGGAGU | 20 | 1468 |
| ERCC4-9 | + | GCGACCCGGAAGAGCUUCCA | 20 | 1469 |
| ERCC4-10 | + | GCUGGAGUACGAGCGACAGC | 20 | 1470 |
| ERCC4-11 | + | GGAAGAGCUUCCAUGGAGUC | 20 | 1471 |
| ERCC4-12 | + | GGCUGCCGUCCUCUCGGACU | 20 | 1472 |
| ERCC4-13 | + | GGCUGCGUUCGGCUGCGACC | 20 | 1473 |
| ERCC4-14 | + | GUACGAGCGACAGCUGGUGC | 20 | 1474 |
| ERCC4-15 | − | GUACUCCAGCAGCGGCGCCA | 20 | 1475 |

[0763] Table II.45B provides exemplary targeting domains of gRNAs to be used with an eiCas9 fusion molecule (e.g., an eiCas9 fused to a transcription activator or repressor domain) to alter (e.g., activate or repress) a gene, e.g., ERCC4 gene. The targeting domains of gRNAs were selected according to the second tier parameters. The targeting domains bind within 500 bp spanning a transcription start site (TSS), e.g., upstream or downstream of a TSS and have a high level of orthogonality. It is contemplated herein that in an embodiment the targeting domain hybridizes to the target domain through complementary base pairing. Any of the targeting domains in the table can be used with a S. pyogenes eiCas9 fusion molecule (e.g., an eiCas9 fused to a transcription activator or repressor domain) to alter (e.g., activate or repress) the ERCC4 gene. One or more gRNA may be used to target an eiCas9 fusion molecule to a region spanning 500 bp of a transcription start site (TSS) of the ERCC4 gene.

TABLE II.45B
Exemplary HDR-enhancing gRNAs Targeting a ERCC4 Gene

| S. pyogenes | A high level of orthogonality | | | |
|---|---|---|---|---|
| 2nd Tier | 45B | | | |
| gRNA | | | Target Site | |
| Name | DNA Strand | Targeting Domain | Length | Seq ID |
| ERCC4-16 | − | AGCCGGCUGCCCUGACUCCA | 20 | 1476 |
| ERCC4-17 | + | AGUCAGGGCAGCCGGCUCGA | 20 | 1477 |
| ERCC4-18 | + | AGUUCGGCCUACUCUCCACU | 20 | 1478 |
| ERCC4-19 | + | CACUAGGAGUCGGCUUCCUU | 20 | 1479 |
| ERCC4-20 | − | CGAAGAGAGCCGAGUCCGAG | 20 | 1480 |
| ERCC4-21 | − | CGAAGGAAGCCGACUCCUAG | 20 | 1481 |
| ERCC4-22 | + | CGGCUCUCUUCGGUUGAGUU | 20 | 1482 |
| ERCC4-23 | + | CGGCUUCCUUCGGCUGCGUU | 20 | 1483 |
| ERCC4-24 | + | CUCUCGGACUCGGCUCUCUU | 20 | 1484 |
| ERCC4-25 | + | CUGGAACUGCUCGACACUGA | 20 | 1485 |
| ERCC4-26 | − | UCGCAGCCGAACGCAGCCGA | 20 | 1486 |
| ERCC4-27 | + | UCGGCUGGCUGCCGUCCUCU | 20 | 1487 |
| ERCC4-28 | − | UGACUCCAUGGAAGCUCUUC | 20 | 1488 |
| ERCC4-29 | + | UGGAACUGCUCGACACUGAC | 20 | 1489 |
| ERCC4-30 | − | UGUCGCUCGUACUCCAGCAG | 20 | 1490 |
| ERCC4-31 | + | UUCCAUGGAGUCAGGGCAGC | 20 | 1491 |

[0764] Table II.46A provides exemplary targeting domains of gRNAs to be used with an eiCas9 fusion molecule (e.g., an eiCas9 fused to a transcription activator or repressor domain) to alter (e.g., activate or repress) a gene, e.g., ERCC4 gene. The targeting domains of gRNAs were selected according to the first tier parameters. The targeting domains bind within 500 bp spanning a transcription start site (TSS), e.g., upstream or downstream of a TSS, have a high level of orthogonality, start with a 5′G and PAM is NNGRRT. It is contemplated herein that in an embodiment the targeting domain hybridizes to the target domain through complementary base pairing. Any of the targeting domains in the table can be used with a S. aureus eiCas9 fusion molecule (e.g., an eiCas9 fused to a transcription activator or repressor domain) to alter (e.g., activate or repress) the ERCC4 gene. One or more gRNA may be used to target an eiCas9 fusion molecule to a region spanning 500 bp of a transcription start site (TSS) of the ERCC4 gene.

TABLE II.46A
Exemplary HDR-enhancing gRNA Targeting a ERCC4 Gene

| S. aureus | A high level of orthogonality,starts with a G, PAM is NNGRRT | | | |
|---|---|---|---|---|
| 1st Tier | 46A | | | |
| gRNA | | | Target Site | |
| Name | DNA Strand | Targeting Domain | Length | Seq ID |
| ERCC4-32 | − | GGCCGAACUCAACCGAAGAGAG | 22 | 1492 |

[0765] Table II.46B provides exemplary targeting domains of gRNAs to be used with an eiCas9 fusion molecule (e.g., an eiCas9 fused to a transcription activator or repressor domain) to alter (e.g., activate or repress) a gene, e.g., ERCC4 gene. The targeting domains of gRNAs were selected according to the second tier parameters. The targeting domains bind within 500 bp spanning a transcription start site (TSS), e.g., upstream or downstream of a TSS, have a high level of orthogonality and PAM is NNGRRT. It is contemplated herein that in an embodiment the targeting domain hybridizes to the target domain through complementary base pairing. Any of the targeting domains in the table can be used with a S. aureus eiCas9 fusion molecule (e.g., an eiCas9 fused to a transcription activator or repressor domain) to alter (e.g., activate or repress) the ERCC4 gene. One or more gRNA may be used to target an eiCas9 fusion molecule to a region spanning 500 bp of a transcription start site (TSS) of the ERCC4 gene.

TABLE II.46B
Exemplary HDR-enhancing gRNAs Targeting a ERCC4 Gene

| S. aureus | A high level of orthogonality, and PAM is NNGRRT | | | |
|---|---|---|---|---|
| 2nd Tier | 46B | | | |
| gRNA | | | Target Site | |
| Name | DNA Strand | Targeting Domain | Length | Seq ID |
| ERCC4-33 | − | CCCUGACUCCAUGGAAGCUCUU | 22 | 1493 |
| ERCC4-34 | − | CGAAGGAAGCCGACUCCUAGUG | 22 | 1494 |
| ERCC4-35 | + | CGGAUUGCCAUGGCGCCGCUGC | 22 | 1495 |
| ERCC4-36 | + | CUGCGACCCGGAAGAGCUUCCA | 22 | 1496 |
| ERCC4-37 | + | UCUCGGACUCGGCUCUCUUCGG | 22 | 1497 |
| ERCC4-38 | + | UGAGUUCGGCCUACUCUCCACU | 22 | 1498 |
| ERCC4-39 | + | UGGAGUCAGGGCAGCCGGCUCG | 22 | 1499 |

[0766] Table II.47A provides exemplary targeting domains of gRNAs to be used with an eiCas9 fusion molecule (e.g., an eiCas9 fused to a transcription activator or repressor domain) to alter (e.g., activate or repress) a gene, e.g., PARP1 gene. The targeting domains of gRNAs were selected according to the first tier parameters. The targeting domains bind within 500 bp spanning a transcription start site (TSS), e.g., upstream or downstream of a TSS, have a high level of orthogonality and start with a 5′G. It is contemplated herein that in an embodiment the targeting domain hybridizes to the target domain through complementary base pairing. Any of the targeting domains in the table can be used with a S. pyogenes eiCas9 fusion molecule (e.g., an eiCas9 fused to a transcription activator or repressor domain) to alter (e.g., activate or repress) the PARP1 gene. One or more gRNA may be used to target an eiCas9 fusion molecule to a region spanning 500 bp of a transcription start site (TSS) of the PARP1 gene.

TABLE II.47A
Exemplary HDR-enhancing gRNAs Targeting a PARP1 Gene

| S. pyogenes | A high level of orthogonality, and starts with a G | | | |
|---|---|---|---|---|
| 1st Tier | 47A | | | |
| gRNA | | | Target Site | |
| Name | DNA Strand | Targeting Domain | Length | Seq ID |
| PARP1-1 | − | GAACCCGCGUCCACGGGGCG | 20 | 1500 |
| PARP1-2 | − | GAUUGCUGAUGCCUGGCCGC | 20 | 1501 |
| PARP1-3 | + | GCAGGGGGCGCGCGCGCCGC | 20 | 1502 |
| PARP1-4 | − | GCCCACGGAACCCGCGUCCA | 20 | 1503 |
| PARP1-5 | − | GCCCCCUGCCGGCCGGGGGG | 20 | 1504 |
| PARP1-6 | + | GCCGCUCAGGCGCCUGCGGC | 20 | 1505 |
| PARP1-7 | + | GCGCACGCGAGGCGGCGAGG | 20 | 1506 |
| PARP1-8 | + | GCGCCGCCGGCCCCGCCCCG | 20 | 1507 |
| PARP1-9 | − | GCGCGCCCCCUGCCGGCCGG | 20 | 1508 |
| PARP1-10 | − | GCGCGCGCCCCCUGCCGGCC | 20 | 1509 |
| PARP1-11 | − | GCGGCGCGCGCGCCCCCUGC | 20 | 1510 |
| PARP1-12 | − | GCGUGCGCUCACCCAGCCGC | 20 | 1511 |
| PARP1-13 | − | GGAACCCGCGUCCACGGGGC | 20 | 1512 |
| PARP1-14 | + | GGCAGCGUGUUUCUAGGUCG | 20 | 1513 |
| PARP1-15 | + | GGCCGGUGCGGCGUGUUCGG | 20 | 1514 |
| PARP1-16 | + | GGCGUGUUCGGUGGCGGCUC | 20 | 1515 |
| PARP1-17 | + | GGGAACGGCGGUGGCCGGUG | 20 | 1516 |
| PARP1-18 | + | GGGUUCCGUGGGCGUUCCCG | 20 | 1517 |
| PARP1-19 | + | GGUGGCCGGUGCGGCGUGUU | 20 | 1518 |
| PARP1-20 | + | GGUGGCGGCUCUGGCCGCUC | 20 | 1519 |

[0767] Table II.47B provides exemplary targeting domains of gRNAs to be used with an eiCas9 fusion molecule (e.g., an eiCas9 fused to a transcription activator or repressor domain) to alter (e.g., activate or repress) a gene, e.g., PARP1 gene. The targeting domains of gRNAs were selected according to the second tier parameters. The targeting domains bind within 500 bp spanning a transcription start site (TSS), e.g., upstream or downstream of a TSS and have a high level of orthogonality. It is contemplated herein that in an embodiment the targeting domain hybridizes to the target domain through complementary base pairing. Any of the targeting domains in the table can be used with a S. pyogenes eiCas9 fusion molecule (e.g., an eiCas9 fused to a transcription activator or repressor domain) to alter (e.g., activate or repress) the PARP1 gene. One or more gRNA may be used to target an eiCas9 fusion molecule to a region spanning 500 bp of a transcription start site (TSS) of the PARP1 gene.

TABLE II.47B
Exemplary HDR-enhancing gRNAs Targeting a PARP1 Gene

| S. pyogenes | A high level of orthogonality | | | |
|---|---|---|---|---|
| 2nd Tier | 47B | | | |
| gRNA | | | Target Site | |
| Name | DNA Strand | Targeting Domain | Length | Seq ID |
| PARP1-21 | + | AACUCCGCCCCCCGGCCGGC | 20 | 1520 |
| PARP1-22 | + | AAUCUAUCAGGGAACGGCGG | 20 | 1521 |
| PARP1-23 | + | ACUCCGCCCCCCGGCCGGCA | 20 | 1522 |
| PARP1-24 | + | AGCAAUCUAUCAGGGAACGG | 20 | 1523 |
| PARP1-25 | − | CCACGGAACCCGCGUCCACG | 20 | 1524 |
| PARP1-26 | − | CCCACGGAACCCGCGUCCAC | 20 | 1525 |
| PARP1-27 | + | CCCCGUGGACGCGGGUUCCG | 20 | 1526 |
| PARP1-28 | + | CCCGUGGACGCGGGUUCCGU | 20 | 1527 |
| PARP1-29 | + | CCGCUCAGGCGCCUGCGGCU | 20 | 1528 |
| PARP1-30 | + | CCGUGGGCGUUCCCGCGGCC | 20 | 1529 |
| PARP1-31 | − | CCUGAUAGAUUGCUGAUGCC | 20 | 1530 |
| PARP1-32 | − | CCUGGCCGCGGGAACGCCCA | 20 | 1531 |
| PARP1-33 | + | CGAGGCGGCAGCGUGUUUCU | 20 | 1532 |
| PARP1-34 | − | CGCCACCGAACACGCCGCAC | 20 | 1533 |
| PARP1-35 | − | CGGAACCCGCGUCCACGGGG | 20 | 1534 |
| PARP1-36 | + | CGGCUGGGUGAGCGCACGCG | 20 | 1535 |
| PARP1-37 | + | CGGUGCGGCGUGUUCGGUGG | 20 | 1536 |
| PARP1-38 | + | CUGGGUGAGCGCACGCGAGG | 20 | 1537 |
| PARP1-39 | + | UAUCAGGGAACGGCGGUGGC | 20 | 1538 |
| PARP1-40 | + | UGAGCGCACGCGAGGCGGCG | 20 | 1539 |

[0768] Table II.48A provides exemplary targeting domains of gRNAs to be used with an eiCas9 fusion molecule (e.g., an eiCas9 fused to a transcription activator or repressor domain) to alter (e.g., activate or repress) a gene, e.g., PARP1 gene. The targeting domains of gRNAs were selected according to the first tier parameters. The targeting domains bind within 500 bp spanning a transcription start site (TSS), e.g., upstream or downstream of a TSS, have a high level of orthogonality, start with a 5′G and PAM is NNGRRT. It is contemplated herein that in an embodiment the targeting domain hybridizes to the target domain through complementary base pairing. Any of the targeting domains in the table can be used with a S. aureus eiCas9 fusion molecule (e.g., an eiCas9 fused to a transcription activator or repressor domain) to alter (e.g., activate or repress) the PARP1 gene. One or more gRNA may be used to target an eiCas9 fusion molecule to a region spanning 500 bp of a transcription start site (TSS) of the PARP1 gene.

TABLE II.48A
Exemplary HDR-enhancing gRNA Targeting a PARP1 Gene

| S. aureus | A high level of orthogonality, starts with a G, PAM is NNGRRT | | | |
|---|---|---|---|---|
| 1st Tier | 48A | | | |
| gRNA | | | Target Site | |
| Name | DNA Strand | Targeting Domain | Length | Seq ID |
| PARP1-41 | − | GCGCCCCCUGCCGGCCGGGGGG | 22 | 1540 |

[0769] Table II.48B provides exemplary targeting domains of gRNAs to be used with an eiCas9 fusion molecule (e.g., an eiCas9 fused to a transcription activator or repressor domain) to alter (e.g., activate or repress) a gene, e.g., PARP1 gene. The targeting domains of gRNAs were selected according to the second tier parameters. The targeting domains bind within 500 bp spanning a transcription start site (TSS), e.g., upstream or downstream of a TSS, have a high level of orthogonality and PAM is NNGRRT. It is contemplated herein that in an embodiment the targeting domain hybridizes to the target domain through complementary base pairing. Any of the targeting domains in the table can be used with a S. aureus eiCas9 fusion molecule (e.g., an eiCas9 fused to a transcription activator or repressor domain) to alter (e.g., activate or repress) the PARP1 gene. One or more gRNA may be used to target an eiCas9 fusion molecule to a region spanning 500 bp of a transcription start site (TSS) of the PARP1 gene.

TABLE II.48B
Exemplary HDR-enhancing gRNAs Targeting a PARP1 Gene

| S. aureus | A high level of orthogonality, and PAM is NNGRRT | | | |
|---|---|---|---|---|
| 2nd Tier | 48B | | | |
| gRNA | | | Target Site | |
| Name | DNA Strand | Targeting Domain | Length | Seq ID |
| PARP1-42 | + | CCGCCGGCCCCGCCCCGUGGAC | 22 | 1541 |
| PARP1-43 | + | CUGGCCGCUCAGGCGCCUGCGG | 22 | 1542 |

[0770] Table II.49A provides exemplary targeting domains of gRNAs to be used with an eiCas9 fusion molecule (e.g., an eiCas9 fused to a transcription activator or repressor domain) to alter (e.g., activate or repress) a gene, e.g., BRCA1 gene. The targeting domains of gRNAs were selected according to the first tier parameters. The targeting domains bind within 500 bp spanning a transcription start site (TSS), e.g., upstream or downstream of a TSS, have a high level of orthogonality and start with a 5′G. It is contemplated herein that in an embodiment the targeting domain hybridizes to the target domain through complementary base pairing. Any of the targeting domains in the table can be used with a S. pyogenes eiCas9 fusion molecule (e.g., an eiCas9 fused to a transcription activator or repressor domain) to alter (e.g., activate or repress) the BRCA1 gene. One or more gRNA may be used to target an eiCas9 fusion molecule to a region spanning 500 bp of a transcription start site (TSS) of the BRCA1 gene.

TABLE II.49A
Exemplary HDR-enhancing gRNAs Targeting a BRCA1 Gene

| S. pyogenes | A high level of orthogonality, and starts with a G | | | |
|---|---|---|---|---|
| 1st Tier | 49A | | | |
| gRNA | | | Target Site | |
| Name | DNA Strand | Targeting Domain | Length | Seq ID |
| BRCA1-1 | − | GAAAGAGCCAAGCGUCUCUC | 20 | 1543 |
| BRCA1-2 | + | GAGGCCUUCACCCUCUGCUC | 20 | 1544 |
| BRCA1-3 | + | GAGUCCCGGGAAAGGGACAG | 20 | 1545 |
| BRCA1-4 | + | GAUGCUCUGGGGUACUGGCG | 20 | 1546 |
| BRCA1-5 | + | GCUCGCUGAGACUUCCUGGA | 20 | 1547 |
| BRCA1-6 | + | GCUGCUUAGCGGUAGCCCCU | 20 | 1548 |
| BRCA1-7 | − | GGGCCCCCUGUCCCUUUCCC | 20 | 1549 |
| BRCA1-8 | + | GGGGCCCAAGUGAUGCUCUG | 20 | 1550 |
| BRCA1-9 | + | GGGGGCCCAAGUGAUGCUCU | 20 | 1551 |
| BRCA1-10 | + | GGGGUACUGGCGUGGGAGAG | 20 | 1552 |
| BRCA1-11 | + | GGGUAAAGGUAGUAGAGUCC | 20 | 1553 |
| BRCA1-12 | + | GGUAAAGGUAGUAGAGUCCC | 20 | 1554 |
| BRCA1-13 | − | GGUACAAUCAGAGGAUGGGA | 20 | 1555 |
| BRCA1-14 | + | GGUAGUAGAGUCCCGGGAAA | 20 | 1556 |
| BRCA1-15 | − | GGUGAAGGCCUCCUGAGCGC | 20 | 1557 |
| BRCA1-16 | − | GUGAAGGCCUCCUGAGCGCA | 20 | 1558 |
| BRCA1-17 | + | GUGAGCUCGCUGAGACUUCC | 20 | 1559 |
| BRCA1-18 | + | GUGGGGUUUCUCAGAUAACU | 20 | 1560 |

[0771] Table II.49B provides exemplary targeting domains of gRNAs to be used with an eiCas9 fusion molecule (e.g., an eiCas9 fused to a transcription activator or repressor domain) to alter (e.g., activate or repress) a gene, e.g., BRCA1 gene. The targeting domains of gRNAs were selected according to the second tier parameters. The targeting domains bind within 500 bp spanning a transcription start site (TSS), e.g., upstream or downstream of a TSS and have a high level of orthogonality. It is contemplated herein that in an embodiment the targeting domain hybridizes to the target domain through complementary base pairing. Any of the targeting domains in the table can be used with a S. pyogenes eiCas9 fusion molecule (e.g., an eiCas9 fused to a transcription activator or repressor domain) to alter (e.g., activate or repress) the BRCA1 gene. One or more gRNA may be used to target an eiCas9 fusion molecule to a region spanning 500 bp of a transcription start site (TSS) of the BRCA1 gene.

TABLE II.49B
Exemplary HDR-enhancing gRNAs Targeting a BRCA1 Gene

| S. pyogenes | A high level of orthogonality | | | |
|---|---|---|---|---|
| 2nd Tier | 49B | | | |
| gRNA | | | Target Site | |
| Name | DNA Strand | Targeting Domain | Length | Seq ID |
| BRCA1-19 | − | AAAGAGCCAAGCGUCUCUCG | 20 | 1561 |
| BRCA1-20 | + | AAAUUAAAACUGCGACUGCG | 20 | 1562 |
| BRCA1-21 | + | ACGUCAUCCGGGGGCAGACU | 20 | 1563 |
| BRCA1-22 | − | CCAAGCGUCUCUCGGGGCUC | 20 | 1564 |
| BRCA1-23 | + | CCCCUUGGUUUCCGUGGCAA | 20 | 1565 |
| BRCA1-24 | − | CCCGCGCUUUUCCGUUGCCA | 20 | 1566 |
| BRCA1-25 | + | CCGUGGCAACGGAAAAGCGC | 20 | 1567 |
| BRCA1-26 | − | CCGUUGCCACGGAAACCAAG | 20 | 1568 |
| BRCA1-27 | − | CCUCUCAGAAUACGAAAUCA | 20 | 1569 |
| BRCA1-28 | − | CGAAAUCAAGGUACAAUCAG | 20 | 1570 |
| BRCA1-29 | + | CGGUAGCCCCUUGGUUUCCG | 20 | 1571 |
| BRCA1-30 | − | CUGCCCCCGGAUGACGUAAA | 20 | 1572 |
| BRCA1-31 | + | CUUUCCUUUUACGUCAUCCG | 20 | 1573 |
| BRCA1-32 | + | UACGUCAUCCGGGGGCAGAC | 20 | 1574 |
| BRCA1-33 | + | UCAUCCGGGGGCAGACUGGG | 20 | 1575 |
| BRCA1-34 | + | UCCGUGGCAACGGAAAAGCG | 20 | 1576 |
| BRCA1-35 | − | UCCGUUGCCACGGAAACCAA | 20 | 1577 |
| BRCA1-36 | + | UCUUUCCUUUUACGUCAUCC | 20 | 1578 |
| BRCA1-37 | − | UUCCGUUGCCACGGAAACCA | 20 | 1579 |
| BRCA1-38 | + | UUUCCUUUUACGUCAUCCGG | 20 | 1580 |

[0772] Table II.50A provides exemplary targeting domains of gRNAs to be used with an eiCas9 fusion molecule (e.g., an eiCas9 fused to a transcription activator or repressor domain) to alter (e.g., activate or repress) a gene, e.g., BRCA1 gene. The targeting domains of gRNAs were selected according to the first tier parameters. The targeting domains bind within 500 bp spanning a transcription start site (TSS), e.g., upstream or downstream of a TSS, have a high level of orthogonality, start with a 5′G and PAM is NNGRRT. It is contemplated herein that in an embodiment the targeting domain hybridizes to the target domain through complementary base pairing. Any of the targeting domains in the table can be used with a S. aureus eiCas9 fusion molecule (e.g., an eiCas9 fused to a transcription activator or repressor domain) to alter (e.g., activate or repress) the BRCA1 gene. One or more gRNA may be used to target an eiCas9 fusion molecule to a region spanning 500 bp of a transcription start site (TSS) of the BRCA1 gene.

TABLE II.50A
Exemplary HDR-enhancing gRNAs Targeting a BRCA1 Gene

| S. aureus | A high level of orthogonality, starts with a G, PAM is NNGRRT | | | |
|---|---|---|---|---|
| 1st Tier | 50A | | | |
| gRNA | | | Target Site | |
| Name | DNA Strand | Targeting Domain | Length | Seq ID |
| BRCA1-39 | − | GAGCCAAGCGUCUCUCGGGGCU | 22 | 1581 |
| BRCA1-40 | − | GGAUUGGCCACCCAGUCUGCCC | 22 | 1582 |

[0773] Table II.50B provides exemplary targeting domains of gRNAs to be used with an eiCas9 fusion molecule (e.g., an eiCas9 fused to a transcription activator or repressor domain) to alter (e.g., activate or repress) a gene, e.g., BRCA1 gene. The targeting domains of gRNAs were selected according to the second tier parameters. The targeting domains bind within 500 bp spanning a transcription start site (TSS), e.g., upstream or downstream of a TSS, have a high level of orthogonality and PAM is NNGRRT. It is contemplated herein that in an embodiment the targeting domain hybridizes to the target domain through complementary base pairing. Any of the targeting domains in the table can be used with a S. aureus eiCas9 fusion molecule (e.g., an eiCas9 fused to a transcription activator or repressor domain) to alter (e.g., activate or repress) the BRCA1 gene. One or more gRNA may be used to target an eiCas9 fusion molecule to a region spanning 500 bp of a transcription start site (TSS) of the BRCA1 gene.

TABLE II.50B
Exemplary HDR-enhancing gRNAs Targeting a BRCA1 Gene

| S. aureus | A high level of orthogonality, and PAM is NNGRRT | | | |
|---|---|---|---|---|
| 2nd Tier | 50B | | | |
| gRNA | | | Target Site | |
| Name | DNA Strand | Targeting Domain | Length | Seq ID |
| BRCA1-41 | − | AAAAGGAAAGAGACGGAAGAGG | 22 | 1583 |
| BRCA1-42 | + | ACAGGGGGCCCAAGUGAUGCUC | 22 | 1584 |
| BRCA1-43 | − | AUACGAAAUCAAGGUACAAUCA | 22 | 1585 |
| BRCA1-44 | + | AUGCUCUGGGGUACUGGCGUGG | 22 | 1586 |
| BRCA1-45 | + | CAGGAGGCCUUCACCCUCUGCU | 22 | 1587 |
| BRCA1-46 | + | CCUCUGCUCUGGGUAAAGGUAG | 22 | 1588 |
| BRCA1-47 | − | CUACCGCUAAGCAGCAGCCUCU | 22 | 1589 |
| BRCA1-48 | − | UCUACUACCUUUACCCAGAGCA | 22 | 1590 |
| BRCA1-49 | + | UCUGGGGUACUGGCGUGGGAGA | 22 | 1591 |
| BRCA1-50 | + | UUCCGUGGCAACGGAAAAGCGC | 22 | 1592 |
| BRCA1-51 | + | UUCCUGGACGGGGGACAGGCUG | 22 | 1593 |
| BRCA1-52 | + | UUUUACGUCAUCCGGGGGCAGA | 22 | 1594 |

[0774] Table II.51A provides exemplary targeting domains of gRNAs to be used with an eiCas9 fusion molecule (e.g., an eiCas9 fused to a transcription activator or repressor domain) to alter (e.g., activate or repress) a gene, e.g., RBBP8 gene. The targeting domains of gRNAs were selected according to the first tier parameters. The targeting domains bind within 500 bp spanning a transcription start site (TSS), e.g., upstream or downstream of a TSS, have a high level of orthogonality and start with a 5′G. It is contemplated herein that in an embodiment the targeting domain hybridizes to the target domain through complementary base pairing. Any of the targeting domains in the table can be used with a S. pyogenes eiCas9 fusion molecule (e.g., an eiCas9 fused to a transcription activator or repressor domain) to alter (e.g., activate or repress) the RBBP8 gene. One or more gRNA may be used to target an eiCas9 fusion molecule to a region spanning 500 bp of a transcription start site (TSS) of the RBBP8 gene.

TABLE II.51A
Exemplary HDR-enhancing gRNAs Targeting a RBBP8 Gene

| S. pyogenes | A high level of orthogonality, and starts with a G | | | |
|---|---|---|---|---|
| 1st Tier | 51A | | | |
| gRNA | | | Target Site | |
| Name | DNA Strand | Targeting Domain | Length | Seq ID |
| RBBP8-1 | + | GAAUCCCGAGGCAAUCUCGG | 20 | 1595 |
| RBBP8-2 | − | GACAGCCCGCGCUUUAAGGC | 20 | 1596 |
| RBBP8-3 | − | GAGCCCGCGCGACGUCACGC | 20 | 1597 |
| RBBP8-4 | − | GAGGAGCGGGCUCUUCGGUG | 20 | 1598 |
| RBBP8-5 | − | GAUUCGCGAAAGCCCCCGAA | 20 | 1599 |
| RBBP8-6 | + | GCCAGACCCGCACGCGGAAC | 20 | 1600 |
| RBBP8-7 | − | GCCCGCGCCGGUUCCGCGUG | 20 | 1601 |
| RBBP8-8 | + | GCCCGGGCUACACUCGGUGG | 20 | 1602 |
| RBBP8-9 | − | GCCGGUUCCGCGUGCGGGUC | 20 | 1603 |
| RBBP8-10 | + | GCCUUAAAGCGCGGGCUGUC | 20 | 1604 |
| RBBP8-11 | − | GCUUUAAGGCCGGGGGCUGC | 20 | 1605 |
| RBBP8-12 | − | GGAGCCCGCGCGACGUCACG | 20 | 1606 |
| RBBP8-13 | − | GGAUUCGCGAAAGCCCCCGA | 20 | 1607 |
| RBBP8-14 | + | GGCGAAGGGCUCCCGGGGUA | 20 | 1608 |
| RBBP8-15 | + | GGCUCGCGCGCGCGCUUCGG | 20 | 1609 |
| RBBP8-16 | − | GGGGCGGGCUUGGCGGCGAA | 20 | 1610 |
| RBBP8-17 | + | GGGGGCUUUCGCGAAUCCCG | 20 | 1611 |
| RBBP8-18 | − | GGUAGCGCUCGUCCUCCCGC | 20 | 1612 |
| RBBP8-19 | − | GUCGCUCCGACCCAGAGCUC | 20 | 1613 |
| RBBP8-20 | + | GUGCUUGGCGAAGGGCUCCC | 20 | 1614 |

[0775] Table II.51B provides exemplary targeting domains of gRNAs to be used with an eiCas9 fusion molecule (e.g., an eiCas9 fused to a transcription activator or repressor domain) to alter (e.g., activate or repress) a gene, e.g., RBBP8 gene. The targeting domains of gRNAs were selected according to the second tier parameters. The targeting domains bind within 500 bp spanning a transcription start site (TSS), e.g., upstream or downstream of a TSS and have a high level of orthogonality. It is contemplated herein that in an embodiment the targeting domain hybridizes to the target domain through complementary base pairing. Any of the targeting domains in the table can be used with a S. pyogenes eiCas9 fusion molecule (e.g., an eiCas9 fused to a transcription activator or repressor domain) to alter (e.g., activate or repress) the RBBP8 gene. One or more gRNA may be used to target an eiCas9 fusion molecule to a region spanning 500 bp of a transcription start site (TSS) of the RBBP8 gene.

TABLE II.51B
Exemplary HDR-enhancing gRNAs Targeting a RBBP8 Gene

| S. pyogenes | A high level of orthogonality | | | |
|---|---|---|---|---|
| 2nd Tier | 51B | | | |
| gRNA | | | Target Site | |
| Name | DNA Strand | Targeting Domain | Length | Seq ID |
| RBBP8-21 | + | AACUCCCGCGUGACGUCGCG | 20 | 1615 |
| RBBP8-22 | + | ACCCGCACGCGGAACCGGCG | 20 | 1616 |
| RBBP8-23 | − | ACCGCCUCCGAGAUUGCCUC | 20 | 1617 |
| RBBP8-24 | + | ACGAAGUGCGCCGCCGCGAU | 20 | 1618 |
| RBBP8-25 | + | ACGUCGCGCGGGCUCCCGGG | 20 | 1619 |
| RBBP8-26 | + | ACUCCCGCGUGACGUCGCGC | 20 | 1620 |
| RBBP8-27 | − | AGCCCGCGCUUUAAGGCCGG | 20 | 1621 |
| RBBP8-28 | + | CAACCAUCGCCCUCCGGGAU | 20 | 1622 |
| RBBP8-29 | + | CACGAAGUGCGCCGCCGCGA | 20 | 1623 |
| RBBP8-30 | − | CAUCCCGGAGGGCGAUGGUU | 20 | 1624 |
| RBBP8-31 | − | CCCGCGCCGGUUCCGCGUGC | 20 | 1625 |
| RBBP8-32 | + | CGCGAAUCCCGAGGCAAUCU | 20 | 1626 |
| RBBP8-33 | + | CGCGCGCUUCGGAGGUUUUU | 20 | 1627 |
| RBBP8-34 | + | CGGGCCCGGGCUACACUCGG | 20 | 1628 |
| RBBP8-35 | + | CGUGACGUCGCGCGGGCUCC | 20 | 1629 |
| RBBP8-36 | + | UAAAGCGCGGGCUGUCCGGA | 20 | 1630 |
| RBBP8-37 | + | UCCCGAGGCAAUCUCGGAGG | 20 | 1631 |
| RBBP8-38 | − | UCCGGACAGCCCGCGCUUUA | 20 | 1632 |
| RBBP8-39 | − | UCGGUGCGGCCCAUCCCGGA | 20 | 1633 |
| RBBP8-40 | + | UUAAAGCGCGGGCUGUCCGG | 20 | 1634 |

[0776] Table II.52A provides exemplary targeting domains of gRNAs to be used with an eiCas9 fusion molecule (e.g., an eiCas9 fused to a transcription activator or repressor domain) to alter (e.g., activate or repress) a gene, e.g., RBBP8 gene. The targeting domains of gRNAs were selected according to the first tier parameters. The targeting domains bind within 500 bp spanning a transcription start site (TSS), e.g., upstream or downstream of a TSS, have a high level of orthogonality, start with a 5′G and PAM is NNGRRT. It is contemplated herein that in an embodiment the targeting domain hybridizes to the target domain through complementary base pairing. Any of the targeting domains in the table can be used with a S. aureus eiCas9 fusion molecule (e.g., an eiCas9 fused to a transcription activator or repressor domain) to alter (e.g., activate or repress) the RBBP8 gene. One or more gRNA may be used to target an eiCas9 fusion molecule to a region spanning 500 bp of a transcription start site (TSS) of the RBBP8 gene.

TABLE II.52A
Exemplary HDR-enhancing gRNAs Targeting a RBBP8 Gene

| | A high level of orthogonality, starts with a | | | |
|---|---|---|---|---|
| | G, PAM is NNGRRT | | | |
| S. aureus | 52A | | | |
| 1st Tier | | | Target Site | |
| gRNA Name | DNA Strand | Targeting Domain | Length | Seq ID |
| RBBP8-41 | + | GAGCGCUACCUCAGUACUACUU | 22 | 1635 |
| RBBP8-42 | − | GCAGUCGCUCCGACCCAGAGCU | 22 | 1636 |
| RBBP8-43 | − | GGGAGCCCGCGCGACGUCACGC | 22 | 1637 |
| RBBP8-44 | + | GGGUAGGGGUGGCUCCCGGCUC | 22 | 1638 |
| RBBP8-45 | − | GGUGCCCGCGCCGGUUCCGCGU | 22 | 1639 |
| RBBP8-46 | + | GUCGCGCGGGCUCCCGGGCGGG | 22 | 1640 |

[0777] Table II.52B provides exemplary targeting domains of gRNAs to be used with an eiCas9 fusion molecule (e.g., an eiCas9 fused to a transcription activator or repressor domain) to alter (e.g., activate or repress) a gene, e.g., RBBP8 gene. The targeting domains of gRNAs were selected according to the second tier parameters. The targeting domains bind within 500 bp spanning a transcription start site (TSS), e.g., upstream or downstream of a TSS, have a high level of orthogonality and PAM is NNGRRT. It is contemplated herein that in an embodiment the targeting domain hybridizes to the target domain through complementary base pairing. Any of the targeting domains in the table can be used with a S. aureus eiCas9 fusion molecule (e.g., an eiCas9 fused to a transcription activator or repressor domain) to alter (e.g., activate or repress) the RBBP8 gene. One or more gRNA may be used to target an eiCas9 fusion molecule to a region spanning 500 bp of a transcription start site (TSS) of the RBBP8 gene.

TABLE II.52B
Exemplary HDR-enhancing gRNAs Targeting a RBBP8 Gene

| | A high level of orthogonality, and PAM is NNGRRT | | | |
|---|---|---|---|---|
| S. aureus | 52B | | | |
| 2nd Tier | | | Target Site | |
| gRNA Name | DNA Strand | Targeting Domain | Length | Seq ID |
| RBBP8-47 | + | CCUUAAAGCGCGGGCUGUCCGG | 22 | 1641 |
| RBBP8-48 | − | CGCUCCGACCCAGAGCUCCGGG | 22 | 1642 |
| RBBP8-49 | + | CGGAGGGGUCGGCUUUCCCACC | 22 | 1643 |
| RBBP8-50 | + | CGGCGCGGGCACCUGGGGAGAA | 22 | 1644 |
| RBBP8-51 | − | CUCACCGCCUCCGAGAUUGCCU | 22 | 1645 |
| RBBP8-52 | − | CUCUUUCGCCCUUUUCCCUCAC | 22 | 1646 |
| RBBP8-53 | + | CUUGGCGAAGGGCUCCCGGGGU | 22 | 1647 |
| RBBP8-54 | + | UCCCGAGGCAAUCUCGGAGGCG | 22 | 1648 |
| RBBP8-55 | − | UCCUCCCGCCGGUCCACCACCA | 22 | 1649 |
| RBBP8-56 | + | UCGCUUCCCUUCGGGGGCUUUC | 22 | 1650 |
| RBBP8-57 | + | UCUCUUUACCCCACCCGGAGCU | 22 | 1651 |
| RBBP8-58 | + | UGCGUGCUUGGCGAAGGGCUCC | 22 | 1652 |

[0778] Table II.53A provides exemplary targeting domains of gRNAs to be used with an eiCas9 fusion molecule (e.g., an eiCas9 fused to a transcription activator or repressor domain) to alter (e.g., activate or repress) a gene, e.g., EXO1 gene. The targeting domains of gRNAs were selected according to the first tier parameters. The targeting domains bind within 500 bp spanning a transcription start site (TSS), e.g., upstream or downstream of a TSS, have a high level of orthogonality and start with a 5′G. It is contemplated herein that in an embodiment the targeting domain hybridizes to the target domain through complementary base pairing. Any of the targeting domains in the table can be used with a S. pyogenes eiCas9 fusion molecule (e.g., an eiCas9 fused to a transcription activator or repressor domain) to alter (e.g., activate or repress) the EXO1 gene. One or more gRNA may be used to target an eiCas9 fusion molecule to a region spanning 500 bp of a transcription start site (TSS) of the EXO1 gene.

TABLE II.53A
Exemplary HDR-enhancing gRNAs Targeting an EXO1 Gene

| | A high level of orthogonality, and starts with a G | | | |
|---|---|---|---|---|
| S. pyogenes | 53A | | | |
| 1st Tier | | | Target Site | |
| gRNA Name | DNA Strand | Targeting Domain | Length | Seq ID |
| EXO1-1 | − | GACGCGCAGGUCGACCCCCA | 20 | 1653 |
| EXO1-2 | + | GACGUCACAUCCUCUGGGCG | 20 | 1654 |
| EXO1-3 | + | GAGAGCAGACGAUUCCGGGC | 20 | 1655 |
| EXO1-4 | + | GAGGAGAGUCCCUUCUCGGA | 20 | 1656 |
| EXO1-5 | − | GAGGGUCGGAGGUGACGCGC | 20 | 1657 |
| EXO1-6 | + | GAUAAGAGAGCAGACGAUUC | 20 | 1658 |
| EXO1-7 | + | GCACAUCUCCGCGAGACAGA | 20 | 1659 |
| EXO1-8 | + | GCCUAAGGAAACGUGUCGUC | 20 | 1660 |
| EXO1-9 | − | GCGGAAAAAUGAGGUAAGUC | 20 | 1661 |
| EXO1-10 | + | GCGGGCUGUGCGGAGGCUAA | 20 | 1662 |
| EXO1-11 | + | GCGUUGACGUCACAUCCUCU | 20 | 1663 |
| EXO1-12 | + | GCUAAUGGGUGGGUUCCCUU | 20 | 1664 |
| EXO1-13 | − | GCUGACCUUUCAAUUUGCGC | 20 | 1665 |
| EXO1-14 | + | GGAAACGUGUCGUCUGGAAU | 20 | 1666 |
| EXO1-15 | + | GGCUAAUGGGUGGGUUCCCU | 20 | 1667 |
| EXO1-16 | − | GGCUGACCUUUCAAUUUGCG | 20 | 1668 |
| EXO1-17 | + | GGGAUUCGGGUCUUCCAGGA | 20 | 1669 |
| EXO1-18 | + | GUGAGUUAGGGGCGUCGGAG | 20 | 1670 |
| EXO1-19 | + | GUGUUCUGCGUUGCCGGCCG | 20 | 1671 |
| EXO1-20 | + | GUUGCCGGCCGUGGGUGCUC | 20 | 1672 |

[0779] Table II.53B provides exemplary targeting domains of gRNAs to be used with an eiCas9 fusion molecule (e.g., an eiCas9 fused to a transcription activator or repressor domain) to alter (e.g., activate or repress) a gene, e.g., EXO1 gene. The targeting domains of gRNAs were selected according to the second tier parameters. The targeting domains bind within 500 bp spanning a transcription start site (TSS), e.g., upstream or downstream of a TSS and have a high level of orthogonality. It is contemplated herein that in an embodiment the targeting domain hybridizes to the target domain through complementary base pairing. Any of the targeting domains in the table can be used with a S. pyogenes eiCas9 fusion molecule (e.g., an eiCas9 fused to a transcription activator or repressor domain) to alter (e.g., activate or repress) the EXO1 gene. One or more gRNA may be used to target an eiCas9 fusion molecule to a region spanning 500 bp of a transcription start site (TSS) of the EXO1 gene.

TABLE II.53B
Exemplary HDR-enhancing gRNAs Targeting an EXO1 Gene

| | A high level of orthogonality | | | |
|---|---|---|---|---|
| S. pyogenes | 53B | | | |
| 2nd Tier | | | Target Site | |
| gRNA Name | DNA Strand | Targeting Domain | Length | Seq ID |
| EXO1-21 | + | AAUCGGCUCCGCUCAAGGGG | 20 | 1673 |
| EXO1-22 | + | ACCGCAAUCGGCUCCGCUCA | 20 | 1674 |
| EXO1-23 | − | ACGCGCAGGUCGACCCCCAA | 20 | 1675 |
| EXO1-24 | − | ACGGCCGGCAACGCAGAACA | 20 | 1676 |
| EXO1-25 | + | AGGAACCCGCGCAAAUUGAA | 20 | 1677 |
| EXO1-26 | + | CAGCCUUUCGCGCGCUGUGU | 20 | 1678 |
| EXO1-27 | + | CCGACCCUCCUCUCGGGAUU | 20 | 1679 |
| EXO1-28 | + | CCGCAAUCGGCUCCGCUCAA | 20 | 1680 |
| EXO1-29 | + | CGCAAUCGGCUCCGCUCAAG | 20 | 1681 |
| EXO1-30 | + | CGCGUUGACGUCACAUCCUC | 20 | 1682 |
| EXO1-31 | − | CGGCCGGCAACGCAGAACAC | 20 | 1683 |
| EXO1-32 | + | CGGGUUUCUCCAACCGCAAU | 20 | 1684 |
| EXO1-33 | − | CUCGCGGAGAUGUGCAGGCG | 20 | 1685 |
| EXO1-34 | − | UCAACGCGUAUCCCGCAACC | 20 | 1686 |
| EXO1-35 | + | UCUCGGGAUUCGGGUCUUCC | 20 | 1687 |
| EXO1-36 | − | UGAGCGGAGCCGAUUGCGGU | 20 | 1688 |
| EXO1-37 | − | UGGAAGACCCGAAUCCCGAG | 20 | 1689 |
| EXO1-38 | + | UGUUCUGCGUUGCCGGCCGU | 20 | 1690 |
| EXO1-39 | + | UUACCCGUGUUCUGCGUUGC | 20 | 1691 |
| EXO1-40 | − | UUGCCUACACAGCGCGCGAA | 20 | 1692 |

[0780] Table II.54A provides exemplary targeting domains of gRNAs to be used with an eiCas9 fusion molecule (e.g., an eiCas9 fused to a transcription activator or repressor domain) to alter (e.g., activate or repress) a gene, e.g., EXO1 gene. The targeting domains of gRNAs were selected according to the first tier parameters. The targeting domains bind within 500 bp spanning a transcription start site (TSS), e.g., upstream or downstream of a TSS, have a high level of orthogonality, start with a 5′G and PAM is NNGRRT. It is contemplated herein that in an embodiment the targeting domain hybridizes to the target domain through complementary base pairing. Any of the targeting domains in the table can be used with a S. aureus eiCas9 fusion molecule (e.g., an eiCas9 fused to a transcription activator or repressor domain) to alter (e.g., activate or repress) the EXO1 gene. One or more gRNA may be used to target an eiCas9 fusion molecule to a region spanning 500 bp of a transcription start site (TSS) of the EXO1 gene.

TABLE II.54A
Exemplary HDR-enhancing gRNAs Targeting an EXO1 Gene

| | A high level of orthogonality, starts with a | | | |
|---|---|---|---|---|
| | G, PAM is NNGRRT | | | |
| S. aureus | 54A | | | |
| 1st Tier | | | Target Site | |
| gRNA Name | DNA Strand | Targeting Domain | Length | Seq ID |
| EXO1-41 | + | GAUUCCGGGCUGGAGCAGGCGC | 22 | 1693 |
| EXO1-42 | − | GCCUCCUGCGGCUUCCAACUCA | 22 | 1694 |
| EXO1-43 | + | GCGUCACCUCCGACCCUCCUCU | 22 | 1695 |
| EXO1-44 | + | GGAGAGCUCAGGACGCAACCCU | 22 | 1696 |
| EXO1-45 | + | GGAGCGGGCUGUGCGGAGGCUA | 22 | 1697 |
| EXO1-46 | + | GGCCGUGGGUGCUCUGGCCACA | 22 | 1698 |
| EXO1-47 | + | GGGUCUUCCAGGAAGGGAAGGA | 22 | 1699 |
| EXO1-48 | − | GGGUUCCUUGCGGCCCCGCCCA | 22 | 1700 |

[0781] Table II.54B provides exemplary targeting domains of gRNAs to be used with an eiCas9 fusion molecule (e.g., an eiCas9 fused to a transcription activator or repressor domain) to alter (e.g., activate or repress) a gene, e.g., EXO1 gene. The targeting domains of gRNAs were selected according to the second tier parameters. The targeting domains bind within 500 bp spanning a transcription start site (TSS), e.g., upstream or downstream of a TSS, have a high level of orthogonality and PAM is NNGRRT. It is contemplated herein that in an embodiment the targeting domain hybridizes to the target domain through complementary base pairing. Any of the targeting domains in the table can be used with a S. aureus eiCas9 fusion molecule (e.g., an eiCas9 fused to a transcription activator or repressor domain) to alter (e.g., activate or repress) the EXO1 gene. One or more gRNA may be used to target an eiCas9 fusion molecule to a region spanning 500 bp of a transcription start site (TSS) of the EXO1 gene.

TABLE II.54B
Exemplary HDR-enhancing gRNAs Targeting an EXO1 Gene

| | A high level of orthogonality, and PAM is NNGRRT | | | |
|---|---|---|---|---|
| S. aureus | 54B | | | |
| 2nd Tier | | | Target Site | |
| gRNA Name | DNA Strand | Targeting Domain | Length | Seq ID |
| EXO1-49 | − | AAAGGCUGACCUUUCAAUUUGC | 22 | 1701 |
| EXO1-50 | − | AACCCUGGCGCCUGCUCCAGCC | 22 | 1702 |
| EXO1-51 | + | ACAGCGGAGCCCUUAGCCUGAG | 22 | 1703 |
| EXO1-52 | + | ACAGUGAGUUAGGGGCGUCGGA | 22 | 1704 |
| EXO1-53 | + | ACCCAACAGCGGAGCCCUUAGC | 22 | 1705 |
| EXO1-54 | − | ACUCAGGCUAAGGGCUCCGCUG | 22 | 1706 |
| EXO1-55 | + | AGGCCUAAGGAAACGUGUCGUC | 22 | 1707 |
| EXO1-56 | + | AGGCUAAUGGGUGGGUUCCCUU | 22 | 1708 |
| EXO1-57 | − | CCCACGGCCGGCAACGCAGAAC | 22 | 1709 |
| EXO1-58 | + | CCCGUGUUCUGCGUUGCCGGCC | 22 | 1710 |
| EXO1-59 | + | CCUCCGACCCUCCUCUCGGGAU | 22 | 1711 |
| EXO1-60 | + | CCUGCACAUCUCCGCGAGACAG | 22 | 1712 |
| EXO1-61 | + | CGCAGGAGGCGGAACCGGGUUG | 22 | 1713 |
| EXO1-62 | + | CGGCUCCGCUCAAGGGGAGGAG | 22 | 1714 |
| EXO1-63 | + | CGGGCUGUGCGGAGGCUAAUGG | 22 | 1715 |
| EXO1-64 | − | UCUCCUUCCCUUCCUGGAAGAC | 22 | 1716 |
| EXO1-65 | − | UGGAAGACCCGAAUCCCGAGAG | 22 | 1717 |
| EXO1-66 | + | UUGGAAGCCGCAGGAGGCGGAA | 22 | 1718 |

[0782] Table II.55A provides exemplary targeting domains of gRNAs to be used with an eiCas9 fusion molecule (e.g., an eiCas9 fused to a transcription activator or repressor domain) to alter (e.g., activate or repress) a gene, e.g., DNA2 gene. The targeting domains of gRNAs were selected according to the first tier parameters. The targeting domains bind within 500 bp spanning a transcription start site (TSS), e.g., upstream or downstream of a TSS, have a high level of orthogonality and start with a 5′G. It is contemplated herein that in an embodiment the targeting domain hybridizes to the target domain through complementary base pairing. Any of the targeting domains in the table can be used with a S. pyogenes eiCas9 fusion molecule (e.g., an eiCas9 fused to a transcription activator or repressor domain) to alter (e.g., activate or repress) the DNA2 gene. One or more gRNA may be used to target an eiCas9 fusion molecule to a region spanning 500 bp of a transcription start site (TSS) of the DNA2 gene.

TABLE II.55A
Exemplary HDR-enhancing gRNAs Targeting a DNA2 Gene

| | A high level of orthogonality, and starts with a G | | | |
|---|---|---|---|---|
| S. pyogenes | 55A | | | |
| 1st Tier | | | Target Site | |
| gRNA Name | DNA Strand | Targeting Domain | Length | Seq ID |
| DNA2-1 | + | GAACGAACUGGAGCUGCUGA | 20 | 1719 |
| DNA2-2 | + | GAAGAGUUUUUGGGAGGAGG | 20 | 1720 |
| DNA2-3 | − | GACAGAAAAGACAGCGGAAC | 20 | 1721 |
| DNA2-4 | + | GAGCCCUGCUGCUCAGGUGA | 20 | 1722 |
| DNA2-5 | + | GAUGGAGAAGAGUUUUUGGG | 20 | 1723 |
| DNA2-6 | + | GAUGGAGCAGCUGAACGAAC | 20 | 1724 |
| DNA2-7 | − | GCGCCGGCGCGUUCCACGUG | 20 | 1725 |
| DNA2-8 | + | GCGGCCUGGCGCAGGUCAUU | 20 | 1726 |
| DNA2-9 | + | GCUGAUGGAGAAGAGUUUUU | 20 | 1727 |
| DNA2-10 | + | GCUGCCGGCGGAGCUGUGAG | 20 | 1728 |
| DNA2-11 | − | GCUGCUCCAUCCUGGACGCG | 20 | 1729 |
| DNA2-12 | + | GGAACGCGCCGGCGCGGGAG | 20 | 1730 |
| DNA2-13 | + | GGAGAAGAGUUUUUGGGAGG | 20 | 1731 |
| DNA2-14 | + | GGGACAGAGCCCUGCUGCUC | 20 | 1732 |
| DNA2-15 | + | GGGAGGUUUCGGACACGGGU | 20 | 1733 |
| DNA2-16 | + | GGGCCCCACGUGGAACGCGC | 20 | 1734 |
| DNA2-17 | − | GGGCCCCUCACCUGAGCAGC | 20 | 1735 |
| DNA2-18 | + | GGUUGGAGUGUCAAGAGAGA | 20 | 1736 |
| DNA2-19 | + | GUAUUCCCAGUCCUAAGCAA | 20 | 1737 |
| DNA2-20 | + | GUGGAACGCGCCGGCGCGGG | 20 | 1738 |

[0783] Table II.55B provides exemplary targeting domains of gRNAs to be used with an eiCas9 fusion molecule (e.g., an eiCas9 fused to a transcription activator or repressor domain) to alter (e.g., activate or repress) a gene, e.g., DNA2 gene. The targeting domains of gRNAs were selected according to the second tier parameters. The targeting domains bind within 500 bp spanning a transcription start site (TSS), e.g., upstream or downstream of a TSS and have a high level of orthogonality. It is contemplated herein that in an embodiment the targeting domain hybridizes to the target domain through complementary base pairing. Any of the targeting domains in the table can be used with a S. pyogenes eiCas9 fusion molecule (e.g., an eiCas9 fused to a transcription activator or repressor domain) to alter (e.g., activate or repress) the DNA2 gene. One or more gRNA may be used to target an eiCas9 fusion molecule to a region spanning 500 bp of a transcription start site (TSS) of the DNA2 gene.

TABLE II.55B
Exemplary HDR-enhancing gRNAs Targeting a DNA2 Gene

| | A high level of orthogonality | | | |
|---|---|---|---|---|
| S. pyogenes | 55B | | | |
| 2nd Tier | | | Target Site | |
| gRNA Name | DNA Strand | Targeting Domain | Length | Seq ID |
| DNA2-21 | + | AACCCGGGAGGUUUCGGACA | 20 | 1739 |
| DNA2-22 | − | AACCCGUGUCCGAAACCUCC | 20 | 1740 |
| DNA2-23 | − | ACAGAAAAGACAGCGGAACC | 20 | 1741 |
| DNA2-24 | + | ACCCGGGAGGUUUCGGACAC | 20 | 1742 |
| DNA2-25 | − | ACCCGUGUCCGAAACCUCCC | 20 | 1743 |
| DNA2-26 | − | AGAAAAGACAGCGGAACCGG | 20 | 1744 |
| DNA2-27 | + | AGUCCUAAGCAAGGGAGCAA | 20 | 1745 |
| DNA2-28 | + | AGUUUGCGAUCCCCGCGUCC | 20 | 1746 |
| DNA2-29 | + | CACGUGGAACGCGCCGGCGC | 20 | 1747 |
| DNA2-30 | − | CAGAAAAGACAGCGGAACCG | 20 | 1748 |
| DNA2-31 | + | CCACGUGGAACGCGCCGGCG | 20 | 1749 |
| DNA2-32 | − | CCGCGCCGGCGCGUUCCACG | 20 | 1750 |
| DNA2-33 | + | CGCAUGCGCGCGAGGUGCGC | 20 | 1751 |
| DNA2-34 | − | CGCGCCGGCGCGUUCCACGU | 20 | 1752 |
| DNA2-35 | + | CGGCCUGGCGCAGGUCAUUU | 20 | 1753 |
| DNA2-36 | + | UGCGAUCCCCGCGUCCAGGA | 20 | 1754 |
| DNA2-37 | + | UGGAACGCGCCGGCGCGGGA | 20 | 1755 |
| DNA2-38 | − | UGUCCCAAAUGACCUGCGCC | 20 | 1756 |
| DNA2-39 | − | UUCGUUCAGCUGCUCCAUCC | 20 | 1757 |
| DNA2-40 | − | UUGCUCCCUUGCUUAGGACU | 20 | 1758 |

[0784] Table II.56A provides exemplary targeting domains of gRNAs to be used with an eiCas9 fusion molecule (e.g., an eiCas9 fused to a transcription activator or repressor domain) to alter (e.g., activate or repress) a gene, e.g., DNA2 gene. The targeting domains of gRNAs were selected according to the first tier parameters. The targeting domains bind within 500 bp spanning a transcription start site (TSS), e.g., upstream or downstream of a TSS, have a high level of orthogonality, start with a 5′G and PAM is NNGRRT. It is contemplated herein that in an embodiment the targeting domain hybridizes to the target domain through complementary base pairing. Any of the targeting domains in the table can be used with a S. aureus eiCas9 fusion molecule (e.g., an eiCas9 fused to a transcription activator or repressor domain) to alter (e.g., activate or repress) the DNA2 gene. One or more gRNA may be used to target an eiCas9 fusion molecule to a region spanning 500 bp of a transcription start site (TSS) of the DNA2 gene.

TABLE II.56A
Exemplary HDR-enhancing gRNAs Targeting a DNA2 Gene

| | A high level of orthogonality, starts with a | | | |
|---|---|---|---|---|
| | G, PAM is NNGRRT | | | |
| S. aureus | 56A | | | |
| 1st Tier | | | Target Site | |
| gRNA Name | DNA Strand | Targeting Domain | Length | Seq ID |
| DNA2-41 | + | GCGCAGGUCAUUUGGGACAUCU | 22 | 1759 |
| DNA2-42 | + | GUGAACCCGGGAGGUUUCGGAC | 22 | 1760 |

[0785] Table II.56B provides exemplary targeting domains of gRNAs to be used with an eiCas9 fusion molecule (e.g., an eiCas9 fused to a transcription activator or repressor domain) to alter (e.g., activate or repress) a gene, e.g., DNA2 gene. The targeting domains of gRNAs were selected according to the second tier parameters. The targeting domains bind within 500 bp spanning a transcription start site (TSS), e.g., upstream or downstream of a TSS, have a high level of orthogonality and PAM is NNGRRT. It is contemplated herein that in an embodiment the targeting domain hybridizes to the target domain through complementary base pairing. Any of the targeting domains in the table can be used with a S. aureus eiCas9 fusion molecule (e.g., an eiCas9 fused to a transcription activator or repressor domain) to alter (e.g., activate or repress) the DNA2 gene. One or more gRNA may be used to target an eiCas9 fusion molecule to a region spanning 500 bp of a transcription start site (TSS) of the DNA2 gene.

TABLE II.56B
Exemplary HDR-enhancing gRNAs Targeting a DNA2 Gene

| | A high level of orthogonality, and PAM is NNGRRT | | | |
|---|---|---|---|---|
| S. aureus | 56B | | | |
| 2nd Tier | | | Target Site | |
| gRNA Name | DNA Strand | Targeting Domain | Length | Seq ID |
| DNA2-43 | − | AGACAGAAAAGACAGCGGAACC | 22 | 1761 |
| DNA2-44 | + | CCGGGAGGUUUCGGACACGGGU | 22 | 1762 |
| DNA2-45 | + | CGAACUGGAGCUGCUGAUGGAG | 22 | 1763 |
| DNA2-46 | − | CUUGCUUAGGACUGGGAAUACA | 22 | 1764 |
| DNA2-47 | − | CUUUGCUCCCUUGCUUAGGACU | 22 | 1765 |
| DNA2-48 | + | UACAGUUUGCGAUCCCCGCGUC | 22 | 1766 |
| DNA2-49 | − | UCAGCUGCUCCAUCCUGGACGC | 22 | 1767 |
| DNA2-50 | − | UCCAACCCGUGUCCGAAACCUC | 22 | 1768 |

[0786] Table II.57A provides exemplary targeting domains of gRNAs to be used with an eiCas9 fusion molecule (e.g., an eiCas9 fused to a transcription activator or repressor domain) to alter (e.g., activate or repress) a gene, e.g., MRE11A gene. The targeting domains of gRNAs were selected according to the first tier parameters. The targeting domains bind within 500 bp spanning a transcription start site (TSS), e.g., upstream or downstream of a TSS, have a high level of orthogonality and start with a 5′G. It is contemplated herein that in an embodiment the targeting domain hybridizes to the target domain through complementary base pairing. Any of the targeting domains in the table can be used with a S. pyogenes eiCas9 fusion molecule (e.g., an eiCas9 fused to a transcription activator or repressor domain) to alter (e.g., activate or repress) the MRE11A gene. One or more gRNA may be used to target an eiCas9 fusion molecule to a region spanning 500 bp of a transcription start site (TSS) of the MRE11A gene.

TABLE II.57A
Exemplary HDR-enhancing gRNAs Targeting a MRE11A Gene

| | A high level of orthogonality, and starts with a G | | | |
|---|---|---|---|---|
| S. pyogenes | 57A | | | |
| 1st Tier | | | Target Site | |
| gRNA Name | DNA Strand | Targeting Domain | Length | Seq ID |
| MRE11A-1 | − | GAACCCGGAAGUGAGAUGCA | 20 | 1769 |
| MRE11A-2 | − | GAGCCAAUCCUGAGCAGGCU | 20 | 1770 |
| MRE11A-3 | + | GAUUGGCUCCUGCGUGAGGG | 20 | 1771 |
| MRE11A-4 | + | GCCGCCUUGCAUCUCACUUC | 20 | 1772 |
| MRE11A-5 | − | GCCGUAAACCUGAAUUCCGC | 20 | 1773 |
| MRE11A-6 | − | GCGAGGCCCCGCCCUCACGC | 20 | 1774 |
| MRE11A-7 | − | GGCCGUAAACCUGAAUUCCG | 20 | 1775 |
| MRE11A-8 | − | GGCUACCGCACGCAGUGAGG | 20 | 1776 |
| MRE11A-9 | − | GGGCGGGGAAAGUAGCGGCG | 20 | 1777 |
| MRE11A-10 | + | GUAGCCAAUGAGAGCCGAAC | 20 | 1778 |
| MRE11A-11 | + | GUUCGUCUCCUAGCCUGCUC | 20 | 1779 |
| MRE11A-12 | − | GUUUCUCUCGCGACACUUCA | 20 | 1780 |

[0787] Table II.57B provides exemplary targeting domains of gRNAs to be used with an eiCas9 fusion molecule (e.g., an eiCas9 fused to a transcription activator or repressor domain) to alter (e.g., activate or repress) a gene, e.g., MRE11A gene. The targeting domains of gRNAs were selected according to the second tier parameters. The targeting domains bind within 500 bp spanning a transcription start site (TSS), e.g., upstream or downstream of a TSS and have a high level of orthogonality. It is contemplated herein that in an embodiment the targeting domain hybridizes to the target domain through complementary base pairing. Any of the targeting domains in the table can be used with a S. pyogenes eiCas9 fusion molecule (e.g., an eiCas9 fused to a transcription activator or repressor domain) to alter (e.g., activate or repress) the MRE11A gene. One or more gRNA may be used to target an eiCas9 fusion molecule to a region spanning 500 bp of a transcription start site (TSS) of the MRE11A gene.

TABLE II.57B
Exemplary HDR-enhancing gRNAs Targeting a MRE11A Gene

| | A high level of orthogonality | | | |
|---|---|---|---|---|
| S. pyogenes | 57B | | | |
| 2nd Tier | | | Target Site | |
| gRNA Name | DNA Strand | Targeting Domain | Length | Seq ID |
| MRE11A-13 | − | AAGUCCAGUUCGGCUCUCAU | 20 | 1781 |
| MRE11A-14 | − | ACCGCACGCAGUGAGGGGGC | 20 | 1782 |
| MRE11A-15 | + | ACGGACGCCGUUCUCUCCCG | 20 | 1783 |
| MRE11A-16 | − | AUUGGCUACCGCACGCAGUG | 20 | 1784 |
| MRE11A-17 | + | AUUGGCUCCUGCGUGAGGGC | 20 | 1785 |
| MRE11A-18 | + | CAGGAUUGGCUCCUGCGUGA | 20 | 1786 |
| MRE11A-19 | + | CCCCGCCCCCUCACUGCGUG | 20 | 1787 |
| MRE11A-20 | − | CCGCACGCAGUGAGGGGGCG | 20 | 1788 |
| MRE11A-21 | + | CCGCCUUGCAUCUCACUUCC | 20 | 1789 |
| MRE11A-22 | − | CGCAGGAGCCAAUCCUGAGC | 20 | 1790 |
| MRE11A-23 | + | CGUUCUCUCCCGCGGAAUUC | 20 | 1791 |
| MRE11A-24 | − | CUGAAUUCCGCGGGAGAGAA | 20 | 1792 |
| MRE11A-25 | − | UACCGCACGCAGUGAGGGGG | 20 | 1793 |
| MRE11A-26 | − | UAGAUGCUUCAAGUCCAGUU | 20 | 1794 |
| MRE11A-27 | + | UCAGGAUUGGCUCCUGCGUG | 20 | 1795 |
| MRE11A-28 | + | UCCCGCGGAAUUCAGGUUUA | 20 | 1796 |
| MRE11A-29 | + | UCUCCUAGCCUGCUCAGGAU | 20 | 1797 |
| MRE11A-30 | − | UGGCUACCGCACGCAGUGAG | 20 | 1798 |
| MRE11A-31 | − | UUGGCUACCGCACGCAGUGA | 20 | 1799 |
| MRE11A-32 | + | UUGGCUCCUGCGUGAGGGCG | 20 | 1800 |

[0788] Table II.58A provides exemplary targeting domains of gRNAs to be used with an eiCas9 fusion molecule (e.g., an eiCas9 fused to a transcription activator or repressor domain) to alter (e.g., activate or repress) a gene, e.g., MRE11A gene. The targeting domains of gRNAs were selected according to the first tier parameters. The targeting domains bind within 500 bp spanning a transcription start site (TSS), e.g., upstream or downstream of a TSS, have a high level of orthogonality, start with a 5′G and PAM is NNGRRT. It is contemplated herein that in an embodiment the targeting domain hybridizes to the target domain through complementary base pairing. Any of the targeting domains in the table can be used with a S. aureus eiCas9 fusion molecule (e.g., an eiCas9 fused to a transcription activator or repressor domain) to alter (e.g., activate or repress) the MRE11A gene. One or more gRNA may be used to target an eiCas9 fusion molecule to a region spanning 500 bp of a transcription start site TS S) of the MRE11A gene.

TABLE II.58A
Exemplary HDR-enhancing gRNA Targeting a MRE11A Gene

| | A high level of orthogonality, starts with a | | | |
|---|---|---|---|---|
| | G, PAM is NNGRRT | | | |
| S. aureus | 58A | | | |
| 1st Tier | | | Target Site | |
| gRNA Name | DNA Strand | Targeting Domain | Length | Seq ID |
| MRE11A-33 | − | GAGAACCCGCAGGGCCGUAAAC | 22 | 1801 |

[0789] Table II.58B provides exemplary targeting domains of gRNAs to be used with an eiCas9 fusion molecule (e.g., an eiCas9 fused to a transcription activator or repressor domain) to alter (e.g., activate or repress) a gene, e.g., MRE11A gene. The targeting domains of gRNAs were selected according to the second tier parameters. The targeting domains bind within 500 bp spanning a transcription start site (TSS), e.g., upstream or downstream of a TSS, have a high level of orthogonality and PAM is NNGRRT. It is contemplated herein that in an embodiment the targeting domain hybridizes to the target domain through complementary base pairing. Any of the targeting domains in the table can be used with a S. aureus eiCas9 fusion molecule (e.g., an eiCas9 fused to a transcription activator or repressor domain) to alter (e.g., activate or repress) the MRE1UA gene. One or more gRNA may be used to target an eiCas9 fusion molecule to a region spanning 500 bp of a transcription start site SAS) of the MRE11A gene.

TABLE II.58B
Exemplary HDR-enhancing gRNAs Targeting a MRE11A Gene

| | A high level of orthogonality, and PAM is NNGRRT | | | |
|---|---|---|---|---|
| S. aureus | 58B | | | |
| 2nd Tier | | | Target Site | |
| gRNA Name | DNA Strand | Targeting Domain | Length | Seq ID |
| MRE11A-34 | + | AAACGGACGCCGUUCUCUCCCG | 22 | 1802 |
| MRE11A-35 | + | AUCGCCGCCUUGCAUCUCACUU | 22 | 1803 |
| MRE11A-36 | + | CAGACCGUGUUGUUUUCUUUUC | 22 | 1804 |
| MRE11A-37 | + | CGGAAUUCAGGUUUACGGCCCU | 22 | 1805 |
| MRE11A-38 | + | CGGGUUCGUCUCCUAGCCUGCU | 22 | 1806 |
| MRE11A-39 | − | UCCGUUUCUCUCGCGACACUUC | 22 | 1807 |

[0790] Table II.59A provides exemplary targeting domains of gRNAs to be used with an eiCas9 fusion molecule (e.g., an eiCas9 fused to a transcription activator or repressor domain) to alter (e.g., activate or repress) a gene, e.g., RAD50 gene. The targeting domains of gRNAs were selected according to the first tier parameters. The targeting domains bind within 500 bp spanning a transcription start site (TSS), e.g., upstream or downstream of a TSS, have a high level of orthogonality and start with a 5′G. It is contemplated herein that in an embodiment the targeting domain hybridizes to the target domain through complementary base pairing. Any of the targeting domains in the table can be used with a S. pyogenes eiCas9 fusion molecule (e.g., an eiCas9 fused to a transcription activator or repressor domain) to alter (e.g., activate or repress) the RAD50 gene. One or more gRNA may be used to target an eiCas9 fusion molecule to a region spanning 500 bp of a transcription start site (TSS) of the RAD50 gene.

TABLE II.59A
Exemplary HDR-enhancing gRNAs Targeting a RAD50 Gene

| | A high level of orthogonality, and starts with a G | | | |
|---|---|---|---|---|
| S. pyogenes | 59A | | | |
| 1st Tier | | | Target Site | |
| gRNA Name | DNA Strand | Targeting Domain | Length | Seq ID |
| RAD50-1 | − | GAAGCAGAGGGCUAGGUGCU | 20 | 1808 |
| RAD50-2 | + | GAGAGCGGCGUGGACGCGUG | 20 | 1809 |
| RAD50-3 | − | GCAGCUCCGACUUCCGGGUG | 20 | 1810 |
| RAD50-4 | − | GCCGCUCUCCUGGGGCACGC | 20 | 1811 |
| RAD50-5 | − | GCCGGGAAAUCAGAGUCCCG | 20 | 1812 |
| RAD50-6 | + | GCCGUACCGCACCCGGAAGU | 20 | 1813 |
| RAD50-7 | + | GCGGGGUCGCAUUGUGGCUA | 20 | 1814 |
| RAD50-8 | + | GCGGUUGCGGGGUCGCAUUG | 20 | 1815 |
| RAD50-9 | − | GCGUCCACGCCGCUCUCCUG | 20 | 1816 |
| RAD50-10 | − | GCGUGCGCAGCUCCGACUUC | 20 | 1817 |
| RAD50-11 | + | GCUGUGAGUGCGCGGUUGCG | 20 | 1818 |
| RAD50-12 | + | GGCAGGAAGCUGUGAGUGCG | 20 | 1819 |
| RAD50-13 | + | GGCCCACGUGAUCCGCAGGG | 20 | 1820 |
| RAD50-14 | − | GGCCGCCCUGCGGAUCACGU | 20 | 1821 |
| RAD50-15 | − | GGUGCGGUACGGCGAAGCAG | 20 | 1822 |
| RAD50-16 | − | GGUGCUGGGUGCUGUUGCCA | 20 | 1823 |
| RAD50-17 | − | GGUGCUGUUGCCAGGGGCAG | 20 | 1824 |
| RAD50-18 | − | GUACGGCGAAGCAGAGGGCU | 20 | 1825 |
| RAD50-19 | − | GUGCGGUACGGCGAAGCAGA | 20 | 1826 |
| RAD50-20 | + | GUGGACGCGUGCGGGCCUAG | 20 | 1827 |

[0791] Table II.59B provides exemplary targeting domains of gRNAs to be used with an eiCas9 fusion molecule (e.g., an eiCas9 fused to a transcription activator or repressor domain) to alter (e.g., activate or repress) a gene, e.g., RAD50 gene. The targeting domains of gRNAs were selected according to the second tier parameters. The targeting domains bind within 500 bp spanning a transcription start site (TSS), e.g., upstream or downstream of a TSS and have a high level of orthogonality. It is contemplated herein that in an embodiment the targeting domain hybridizes to the target domain through complementary base pairing. Any of the targeting domains in the table can be used with a S. pyogenes eiCas9 fusion molecule (e.g., an eiCas9 fused to a transcription activator or repressor domain) to alter (e.g., activate or repress) the RAD50 gene. One or more gRNA may be used to target an eiCas9 fusion molecule to a region spanning 500 bp of a transcription start site (TSS) of the RAD50 gene.

TABLE II.59B
Exemplary HDR-enhancing gRNAs Targeting a RAD50 Gene

| S. pyogenes | A high level of orthogonality | | | |
|---|---|---|---|---|
| 2nd Tier | 59B | | | |
| gRNA | | | Target Site | |
| Name | DNA Strand | Targeting Domain | Length | Seq ID |
| RAD50-21 | + | AAGCUGUGAGUGCGCGGUUG | 20 | 1828 |
| RAD50-22 | + | ACCGCGGGACUCUGAUUUCC | 20 | 1829 |
| RAD50-23 | − | ACGCGUCCACGCCGCUCUCC | 20 | 1830 |
| RAD50-24 | + | AGAGCGGCGUGGACGCGUGC | 20 | 1831 |
| RAD50-25 | + | AGAGGCCCACGUGAUCCGCA | 20 | 1832 |
| RAD50-26 | + | AGCUGUGAGUGCGCGGUUGC | 20 | 1833 |
| RAD50-27 | + | AUCCGCAGGGCGGCCGAGGC | 20 | 1834 |
| RAD50-28 | + | CCCGGCGUGCCCCAGGAGAG | 20 | 1835 |
| RAD50-29 | − | CCGCUCUCCUGGGGCACGCC | 20 | 1836 |
| RAD50-30 | − | CGAAGCAGAGGGCUAGGUGC | 20 | 1837 |
| RAD50-31 | + | CGGAGCUGCGCACGCACCGC | 20 | 1838 |
| RAD50-32 | − | CGGCCGCCCUGCGGAUCACG | 20 | 1839 |
| RAD50-33 | + | CGUGAUCCGCAGGGCGGCCG | 20 | 1840 |
| RAD50-34 | − | CGUGCGCAGCUCCGACUUCC | 20 | 1841 |
| RAD50-35 | + | CUGAUUUCCCGGCGUGCCCC | 20 | 1842 |
| RAD50-36 | + | CUGCUUCGCCGUACCGCACC | 20 | 1843 |
| RAD50-37 | + | UAGAGGCCCACGUGAUCCGC | 20 | 1844 |
| RAD50-38 | − | UCCGACUUCCGGGUGCGGUA | 20 | 1845 |
| RAD50-39 | + | UCGGAGCUGCGCACGCACCG | 20 | 1846 |
| RAD50-40 | − | UGCGGAUCACGUGGGCCUCU | 20 | 1847 |

[0792] Table II.60A provides exemplary targeting domains of gRNAs to be used with an eiCas9 fusion molecule (e.g., an eiCas9 fused to a transcription activator or repressor domain) to alter (e.g., activate or repress) a gene, e.g., RAD50 gene. The targeting domains of gRNAs were selected according to the first tier parameters. The targeting domains bind within 500 bp spanning a transcription start site (TSS), e.g., upstream or downstream of a TSS, have a high level of orthogonality, start with a 5′G and PAM is NNGRRT. It is contemplated herein that in an embodiment the targeting domain hybridizes to the target domain through complementary base pairing. Any of the targeting domains in the table can be used with a S. aureus eiCas9 fusion molecule (e.g., an eiCas9 fused to a transcription activator or repressor domain) to alter (e.g., activate or repress) the RAD50 gene. One or more gRNA may be used to target an eiCas9 fusion molecule to a region spanning 500 bp of a transcription start site (TSS) of the RAD50 gene.

TABLE II.60A
Exemplary HDR-enhancing gRNAs Targeting a RAD50 Gene

| S. aureus | A high level of orthogonality, starts with a G, PAM is NNGRRT | | | |
|---|---|---|---|---|
| 1st Tier | 60A | | | |
| gRNA | | | Target Site | |
| Name | DNA Strand | Targeting Domain | Length | Seq ID |
| RAD50-41 | + | GGAAGCUGUGAGUGCGCGGUUG | 22 | 1848 |
| RAD50-42 | − | GGUGCGUGCGCAGCUCCGACUU | 22 | 1849 |

[0793] Table II.60B provides exemplary targeting domains of gRNAs to be used with an eiCas9 fusion molecule (e.g., an eiCas9 fused to a transcription activator or repressor domain) to alter (e.g., activate or repress) a gene, e.g., RAD50 gene. The targeting domains of gRNAs were selected according to the second tier parameters. The targeting domains bind within 500 bp spanning a transcription start site (TSS), e.g., upstream or downstream of a TSS, have a high level of orthogonality and PAM is NNGRRT. It is contemplated herein that in an embodiment the targeting domain hybridizes to the target domain through complementary base pairing. Any of the targeting domains in the table can be used with a S. aureus eiCas9 fusion molecule (e.g., an eiCas9 fused to a transcription activator or repressor domain) to alter (e.g., activate or repress) the RAD50 gene. One or more gRNA may be used to target an eiCas9 fusion molecule to a region spanning 500 bp of a transcription start site (TSS) of the RAD50 gene.

TABLE II.60B
Exemplary HDR-enhancing gRNAs Targeting a RAD50 Gene

| S. aureus | A high level of orthogonality, and PAM is NNGRRT | | | |
|---|---|---|---|---|
| 2nd Tier | 60B | | | |
| gRNA | | | Target Site | |
| Name | DNA Strand | Targeting Domain | Length | Seq ID |
| RAD50-43 | − | AGCUUCCUGCCUCGGCCGCCCU | 22 | 1850 |
| RAD50-44 | + | AGGGCGGCCGAGGCAGGAAGCU | 22 | 1851 |
| RAD50-45 | − | CGGCGAAGCAGAGGGCUAGGUG | 22 | 1852 |
| RAD50-46 | − | CUCCUGGGGCACGCCGGGAAAU | 22 | 1853 |

[0794] Table II.61A provides exemplary targeting domains of gRNAs to be used with an eiCas9 fusion molecule (e.g., an eiCas9 fused to a transcription activator or repressor domain) to alter (e.g., activate or repress) a gene, e.g., NBN gene. The targeting domains of gRNAs were selected according to the first tier parameters. The targeting domains bind within 500 bp spanning a transcription start site (TSS), e.g., upstream or downstream of a TSS, have a high level of orthogonality and start with a 5′G. It is contemplated herein that in an embodiment the targeting domain hybridizes to the target domain through complementary base pairing. Any of the targeting domains in the table can be used with a S. pyogenes eiCas9 fusion molecule (e.g., an eiCas9 fused to a transcription activator or repressor domain) to alter (e.g., activate or repress) the NBN gene. One or more gRNA may be used to target an eiCas9 fusion molecule to a region spanning 500 bp of a transcription start site (TSS) of the NBN gene.

TABLE II.61A
Exemplary HDR-enhancing gRNAs Targeting a NBN Gene

| S. pyogenes | A high level of orthogonality, and starts with a G | | | |
|---|---|---|---|---|
| 1st Tier | 61A | | | |
| gRNA | | | Target Site | |
| Name | DNA Strand | Targeting Domain | Length | Seq ID |
| NBN-1 | − | GAGCGCGGAUACGGCGCCUG | 20 | 1854 |
| NBN-2 | − | GAUGAGGCGGGAGUGCGACU | 20 | 1855 |
| NBN-3 | − | GCAGGCUGCCUUGGAUGAGG | 20 | 1856 |
| NBN-4 | − | GCGGAUACGGCGCCUGCGGU | 20 | 1857 |
| NBN-5 | − | GGCGCUUGCCCGCCACCUGG | 20 | 1858 |
| NBN-6 | − | GGGAGCCACGCAGGCUGCCU | 20 | 1859 |
| NBN-7 | − | GUUAAAAGGGUAUGUUUCUA | 20 | 1860 |

[0795] Table II.61B provides exemplary targeting domains of gRNAs to be used with an eiCas9 fusion molecule (e.g., an eiCas9 fused to a transcription activator or repressor domain) to alter (e.g., activate or repress) a gene, e.g., NBN gene. The targeting domains of gRNAs were selected according to the second tier parameters. The targeting domains bind within 500 bp spanning a transcription start site (TSS), e.g., upstream or downstream of a TSS and have a high level of orthogonality. It is contemplated herein that in an embodiment the targeting domain hybridizes to the target domain through complementary base pairing. Any of the targeting domains in the table can be used with a S. pyogenes eiCas9 fusion molecule (e.g., an eiCas9 fused to a transcription activator or repressor domain) to alter (e.g., activate or repress) the NBN gene. One or more gRNA may be used to target an eiCas9 fusion molecule to a region spanning 500 bp of a transcription start site (TSS) of the NBN gene.

TABLE II.61B
Exemplary HDR-enhancing gRNAs Targeting a NBN Gene

| S. pyogenes | A high level of orthogonality | | | |
|---|---|---|---|---|
| 2nd Tier | 61B | | | |
| gRNA | | | Target Site | |
| Name | DNA Strand | Targeting Domain | Length | Seq ID |
| NBN-8 | − | ACGGCGCCUGCGGUCGGCAU | 20 | 1861 |
| NBN-9 | − | AUGAGGCGGGAGUGCGACUU | 20 | 1862 |
| NBN-10 | − | CACGCAGGCUGCCUUGGAUG | 20 | 1863 |
| NBN-11 | − | CAGGCUGCCUUGGAUGAGGC | 20 | 1864 |
| NBN-12 | + | CCGGAGCCCAUGCCGACCGC | 20 | 1865 |
| NBN-13 | − | CCUGCGGUCGGCAUGGGCUC | 20 | 1866 |
| NBN-14 | − | CUAAGGUGUCGCUGAAUGUA | 20 | 1867 |
| NBN-15 | + | CUCAUCCAAGGCAGCCUGCG | 20 | 1868 |
| NBN-16 | − | CUGCGGUCGGCAUGGGCUCC | 20 | 1869 |
| NBN-17 | − | CUGCUAGACGAGCGCGGAUA | 20 | 1870 |
| NBN-18 | + | CUGUUCCUUUUCCAACCACC | 20 | 1871 |
| NBN-19 | − | CUUGCCCGCCACCUGGUGGU | 20 | 1872 |
| NBN-20 | + | CUUUUCCAACCACCAGGUGG | 20 | 1873 |
| NBN-21 | − | UACGGCGCCUGCGGUCGGCA | 20 | 1874 |
| NBN-22 | + | UCCCGGGAGCGCGCACGUCC | 20 | 1875 |
| NBN-23 | − | UCCGGGACGUGCGCGCUCCC | 20 | 1876 |
| NBN-24 | + | UCGCACUCCCGCCUCAUCCA | 20 | 1877 |
| NBN-25 | − | UGAAAUGUGCUGCGUUAAAA | 20 | 1878 |
| NBN-26 | − | UUGAAAUGUGCUGCGUUAAA | 20 | 1879 |
| NBN-27 | − | UUGGGCGCUUGCCCGCCACC | 20 | 1880 |

[0796] Table II.62A provides exemplary targeting domains of gRNAs to be used with an eiCas9 fusion molecule (e.g., an eiCas9 fused to a transcription activator or repressor domain) to alter (e.g., activate or repress) a gene, e.g., NBN gene. The targeting domains of gRNAs were selected according to the first tier parameters. The targeting domains bind within 500 bp spanning a transcription start site (TSS), e.g., upstream or downstream of a TSS, have a high level of orthogonality, start with a 5′G and PAM is NNGRRT. It is contemplated herein that in an embodiment the targeting domain hybridizes to the target domain through complementary base pairing. Any of the targeting domains in the table can be used with a S. aureus eiCas9 fusion molecule (e.g., an eiCas9 fused to a transcription activator or repressor domain) to alter (e.g., activate or repress) the NBN gene. One or more gRNA may be used to target an eiCas9 fusion molecule to a region spanning 500 bp of a transcription start site (TSS) of the NBN gene.

TABLE II.62A
Exemplary HDR-enhancing gRNA Targeting a NBN Gene

| S. aureus | A high level oforthogonality, starts with a G, PAM is NNGRRT | | | |
|---|---|---|---|---|
| 1st Tier | 62A | | | |
| gRNA | | | Target Site | |
| Name | DNA Strand | Targeting Domain | Length | Seq ID |
| NBN-28 | − | GUAUUGAAAUGUGCUGCGUUAA | 22 | 1881 |

[0797] Table II.62B provides exemplary targeting domains of gRNAs to be used with an eiCas9 fusion molecule (e.g., an eiCas9 fused to a transcription activator or repressor domain) to alter (e.g., activate or repress) a gene, e.g., NBN gene. The targeting domains of gRNAs were selected according to the second tier parameters. The targeting domains bind within 500 bp spanning a transcription start site (TSS), e.g., upstream or downstream of a TSS, have a high level of orthogonality and PAM is NNGRRT. It is contemplated herein that in an embodiment the targeting domain hybridizes to the target domain through complementary base pairing. Any of the targeting domains in the table can be used with a S. aureus eiCas9 fusion molecule (e.g., an eiCas9 fused to a transcription activator or repressor domain) to alter (e.g., activate or repress) the NBN gene. One or more gRNA may be used to target an eiCas9 fusion molecule to a region spanning 500 bp of a transcription start site (TSS) of the NBN gene.

TABLE II.62B
Exemplary HDR-enhancing gRNAs Targeting a NBN Gene

| S. aureus | A high level of orthogonality, and PAM is NNGRRT | | | |
|---|---|---|---|---|
| 2nd Tier | 62B | | | |
| gRNA | | | Target Site | |
| Name | DNA Strand | Targeting Domain | Length | Seq ID |
| NBN-29 | − | AGGGUAUGUUUCUAAGGUGUCG | 22 | 1882 |
| NBN-30 | − | CCCGGGAGCCACGCAGGCUGCC | 22 | 1883 |
| NBN-31 | − | CGCAGGCUGCCUUGGAUGAGGC | 22 | 1884 |

[0798] Table II.63A provides exemplary targeting domains of gRNAs to be used with an eiCas9 fusion molecule (e.g., an eiCas9 fused to a transcription activator or repressor domain) to alter (e.g., activate or repress) a gene, e.g., MSH2 gene. The targeting domains of gRNAs were selected according to the first tier parameters. The targeting domains bind within 500 bp spanning a transcription start site (TSS), e.g., upstream or downstream of a TSS, have a high level of orthogonality and start with a 5′G. It is contemplated herein that in an embodiment the targeting domain hybridizes to the target domain through complementary base pairing. Any of the targeting domains in the table can be used with a S. pyogenes eiCas9 fusion molecule (e.g., an eiCas9 fused to a transcription activator or repressor domain) to alter (e.g., activate or repress) the MSH2 gene. One or more gRNA may be used to target an eiCas9 fusion molecule to a region spanning 500 bp of a transcription start site (TSS) of the MSH2 gene.

TABLE II.63A
Exemplary HDR-enhancing gRNAs Targeting a MSH2 Gene

| S. pyogenes | A high level of orthogonality, and starts with a G | | | |
|---|---|---|---|---|
| 1st Tier | 63A | | | |
| gRNA | | | Target Site | |
| Name | DNA Strand | Targeting Domain | Length | Seq ID |
| MSH2-1 | + | GAAACAGCUUAGUGGGUGUG | 20 | 1885 |
| MSH2-2 | + | GAGGCGGGAAACAGCUUAGU | 20 | 1886 |
| MSH2-3 | + | GCAGCUGAGUAAACACAGAA | 20 | 1887 |
| MSH2-4 | − | GCCCAGCUUCCCGCGCACGC | 20 | 1888 |
| MSH2-5 | + | GCCGCUCGGGGGACGUGGGA | 20 | 1889 |
| MSH2-6 | + | GCCGUGGCCGGACGCCGCUC | 20 | 1890 |
| MSH2-7 | + | GCUAAAGUCACCAGCGUGCG | 20 | 1891 |
| MSH2-8 | − | GCUGCAAGGCUUGAAGCCCC | 20 | 1892 |
| MSH2-9 | + | GGAAACAGCUUAGUGGGUGU | 20 | 1893 |
| MSH2-10 | + | GGACGCCGCUCGGGGGACGU | 20 | 1894 |
| MSH2-11 | + | GGAGGCGGGAAACAGCUUAG | 20 | 1895 |
| MSH2-12 | + | GGGAAACAGCUUAGUGGGUG | 20 | 1896 |
| MSH2-13 | + | GGGCCGCGUCUGCUUAUGAU | 20 | 1897 |
| MSH2-14 | + | GGGGACGUGGGAGGGGAGGC | 20 | 1898 |
| MSH2-15 | + | GGGGGACGUGGGAGGGGAGG | 20 | 1899 |
| MSH2-16 | − | GGUGGGGUGUAUGCAAGGGU | 20 | 1900 |

[0799] Table II.63B provides exemplary targeting domains of gRNAs to be used with an eiCas9 fusion molecule (e.g., an eiCas9 fused to a transcription activator or repressor domain) to alter (e.g., activate or repress) a gene, e.g., MSH2 gene. The targeting domains of gRNAs were selected according to the second tier parameters. The targeting domains bind within 500 bp spanning a transcription start site (TSS), e.g., upstream or downstream of a TSS and have a high level of orthogonality. It is contemplated herein that in an embodiment the targeting domain hybridizes to the target domain through complementary base pairing. Any of the targeting domains in the table can be used with a S. pyogenes eiCas9 fusion molecule (e.g., an eiCas9 fused to a transcription activator or repressor domain) to alter (e.g., activate or repress) the MSH2 gene. One or more gRNA may be used to target an eiCas9 fusion molecule to a region spanning 500 bp of a transcription start site (TSS) of the MSH2 gene.

TABLE II.63B
Exemplary HDR-enhancing gRNAs Targeting a MSH2 Gene

| S. pyogenes | A high level of orthogonality | | | |
|---|---|---|---|---|
| 2nd Tier | 63B | | | |
| gRNA | | | Target Site | |
| Name | DNA Strand | Targeting Domain | Length | Seq ID |
| MSH2-17 | + | ACCAGCGUGCGCGGGAAGCU | 20 | 1901 |
| MSH2-18 | − | AGGGCUGCGUUUCGGUGGGU | 20 | 1902 |
| MSH2-19 | − | AUGCCUGCGCCUAGGUCGCG | 20 | 1903 |
| MSH2-20 | − | CAACCAAUCAUAAGCAGACG | 20 | 1904 |
| MSH2-21 | − | CACGUCCCCCGAGCGGCGUC | 20 | 1905 |
| MSH2-22 | − | CAGGGCUGCGUUUCGGUGGG | 20 | 1906 |
| MSH2-23 | − | CCCCGAGCGGCGUCCGGCCA | 20 | 1907 |
| MSH2-24 | + | CCGCUCGGGGGACGUGGGAG | 20 | 1908 |
| MSH2-25 | + | CCGUGGCCGGACGCCGCUCG | 20 | 1909 |
| MSH2-26 | + | CGCCGUGGCCGGACGCCGCU | 20 | 1910 |
| MSH2-27 | + | CGUGGCCGGACGCCGCUCGG | 20 | 1911 |
| MSH2-28 | + | CUAAAGUCACCAGCGUGCGC | 20 | 1912 |
| MSH2-29 | + | CUACUAAGGAUGCGCGUCUG | 20 | 1913 |
| MSH2-30 | + | CUGAUUGGGUGUGGUCGCCG | 20 | 1914 |
| MSH2-31 | + | CUGCUUAUGAUUGGUUGCCG | 20 | 1915 |
| MSH2-32 | + | UACUAAGGAUGCGCGUCUGC | 20 | 1916 |
| MSH2-33 | − | UACUGCGCAUGCCUGCGCCU | 20 | 1917 |
| MSH2-34 | + | UGCGGGUUUCCGCGCGACCU | 20 | 1918 |
| MSH2-35 | + | UUGGGUGUGGUCGCCGUGGC | 20 | 1919 |
| MSH2-36 | + | UUUCCGCGCGACCUAGGCGC | 20 | 1920 |

[0800] Table II.64A provides exemplary targeting domains of gRNAs to be used with an eiCas9 fusion molecule (e.g., an eiCas9 fused to a transcription activator or repressor domain) to alter (e.g., activate or repress) a gene, e.g., MSH2 gene. The targeting domains of gRNAs were selected according to the first tier parameters. The targeting domains bind within 500 bp spanning a transcription start site (TSS), e.g., upstream or downstream of a TSS, have a high level of orthogonality, start with a 5′G and PAM is NNGRRT. It is contemplated herein that in an embodiment the targeting domain hybridizes to the target domain through complementary base pairing. Any of the targeting domains in the table can be used with a S. aureus eiCas9 fusion molecule (e.g., an eiCas9 fused to a transcription activator or repressor domain) to alter (e.g., activate or repress) the MSH2 gene. One or more gRNA may be used to target an eiCas9 fusion molecule to a region spanning 500 bp of a transcription start site (TSS) of the MSH2 gene.

TABLE II.64A
Exemplary HDR-enhancing gRNAs Targeting a MSH2 Gene

| S. aureus | A high level of orthogonality, starts with a G, PAM is NNGRRT | | | |
|---|---|---|---|---|
| 1st Tier | 64A | | | |
| gRNA | | | Target Site | |
| Name | DNA Strand | Targeting Domain | Length | Seq ID |
| MSH2-37 | + | GAAACGCAGCCCUGGAAGCUGA | 22 | 1921 |
| MSH2-38 | + | GCGGGAAACAGCUUAGUGGGUG | 22 | 1922 |
| MSH2-39 | + | GCUCUACUAAGGAUGCGCGUCU | 22 | 1923 |

[0801] Table II.64B provides exemplary targeting domains of gRNAs to be used with an eiCas9 fusion molecule (e.g., an eiCas9 fused to a transcription activator or repressor domain) to alter (e.g., activate or repress) a gene, e.g., MSH2 gene. The targeting domains of gRNAs were selected according to the second tier parameters. The targeting domains bind within 500 bp spanning a transcription start site (TSS), e.g., upstream or downstream of a TSS, have a high level of orthogonality and PAM is NNGRRT. It is contemplated herein that in an embodiment the targeting domain hybridizes to the target domain through complementary base pairing. Any of the targeting domains in the table can be used with a S. aureus eiCas9 fusion molecule (e.g., an eiCas9 fused to a transcription activator or repressor domain) to alter (e.g., activate or repress) the MSH2 gene. One or more gRNA may be used to target an eiCas9 fusion molecule to a region spanning 500 bp of a transcription start site (TSS) of the MSH2 gene.

TABLE II.64B
Exemplary HDR-enhancing gRNAs Targeting a MSH2 Gene

| S. aureus | A high level of orthogonality, and PAM is NNGRRT | | | |
|---|---|---|---|---|
| 2nd Tier | 64B | | | |
| gRNA | | | Target Site | |
| Name | DNA Strand | Targeting Domain | Length | Seq ID |
| MSH2-40 | + | AAACACAGAAAGGAGCUCUACU | 22 | 1924 |
| MSH2-41 | − | AGCCCCUGGGUGGGGUGUAUGC | 22 | 1925 |
| MSH2-42 | + | AGGGGAGGCGGGAAACAGCUUA | 22 | 1926 |
| MSH2-43 | − | CAGCUUCCAGGGCUGCGUUUCG | 22 | 1927 |
| MSH2-44 | − | CCAGGGCUGCGUUUCGGUGGGU | 22 | 1928 |
| MSH2-45 | + | CCAGGGGCUUCAAGCCUUGCAG | 22 | 1929 |
| MSH2-46 | − | UCAGCUGCAAGGCUUGAAGCCC | 22 | 1930 |
| MSH2-47 | − | UGCAAGGCUUGAAGCCCCUGGG | 22 | 1931 |

[0802] Table II.65A provides exemplary targeting domains of gRNAs to be used with an eiCas9 fusion molecule (e.g., an eiCas9 fused to a transcription activator or repressor domain) to alter (e.g., activate or repress) a gene, e.g., MSH3 gene. The targeting domains of gRNAs were selected according to the first tier parameters. The targeting domains bind within 500 bp spanning a transcription start site (TSS), e.g., upstream or downstream of a TSS, have a high level of orthogonality and start with a 5′G. It is contemplated herein that in an embodiment the targeting domain hybridizes to the target domain through complementary base pairing. Any of the targeting domains in the table can be used with a S. pyogenes eiCas9 fusion molecule (e.g., an eiCas9 fused to a transcription activator or repressor domain) to alter (e.g., activate or repress) the MSH3 gene. One or more gRNA may be used to target an eiCas9 fusion molecule to a region spanning 500 bp of a transcription start site (TSS) of the MSH3 gene.

TABLE II.65A
Exemplary HDR-enhancing gRNAs Targeting a MSH3 Gene

| S. pyogenes | A high level of orthogonality, and starts with a G | | | |
|---|---|---|---|---|
| 1st Tier | 65A | | | |
| gRNA | | | Target Site | |
| Name | DNA Strand | Targeting Domain | Length | Seq ID |
| MSH3-1 | − | GACCCUGCGUGCGCCGGGGC | 20 | 1932 |
| MSH3-2 | − | GAGACAUGGCAGGGCAAGGA | 20 | 1933 |
| MSH3-3 | + | GAGGCCCCGCCCCCCCGCCC | 20 | 1934 |
| MSH3-4 | − | GCAGGGCAAGGAUGGCAGCC | 20 | 1935 |
| MSH3-5 | − | GCCGCGACCCUGCGUGCGCC | 20 | 1936 |
| MSH3-6 | − | GCCUGCACAAAUGGGGACGA | 20 | 1937 |
| MSH3-7 | + | GCGGGCUCGCGCUCCUCGCC | 20 | 1938 |
| MSH3-8 | + | GCUCGCGCCCGCAGACGCCU | 20 | 1939 |
| MSH3-9 | − | GCUUCCGGCGAGACAUGGCA | 20 | 1940 |
| MSH3-10 | − | GGCAGCCCGGCGGCAGGGCC | 20 | 1941 |
| MSH3-11 | − | GGCUUCCGGCGAGACAUGGC | 20 | 1942 |
| MSH3-12 | − | GGGCAAGGAUGGCAGCCCGG | 20 | 1943 |
| MSH3-13 | − | GGGCCUCGCCUGCACAAAUG | 20 | 1944 |
| MSH3-14 | − | GGGGCCUCGCCUGCACAAAU | 20 | 1945 |
| MSH3-15 | + | GUCUCGCCGGAAGCCUGCGU | 20 | 1946 |
| MSH3-16 | − | GUGCGCCGGGGCGGGGGGGC | 20 | 1947 |

[0803] Table II.65B provides exemplary targeting domains of gRNAs to be used with an eiCas9 fusion molecule (e.g., an eiCas9 fused to a transcription activator or repressor domain) to alter (e.g., activate or repress) a gene, e.g., MSH3 gene. The targeting domains of gRNAs were selected according to the second tier parameters. The targeting domains bind within 500 bp spanning a transcription start site (TSS), e.g., upstream or downstream of a TSS and have a high level of orthogonality. It is contemplated herein that in an embodiment the targeting domain hybridizes to the target domain through complementary base pairing. Any of the targeting domains in the table can be used with a S. pyogenes eiCas9 fusion molecule (e.g., an eiCas9 fused to a transcription activator or repressor domain) to alter (e.g., activate or repress) the MSH3 gene. One or more gRNA may be used to target an eiCas9 fusion molecule to a region spanning 500 bp of a transcription start site (TSS) of the MSH3 gene.

TABLE II.65B
Exemplary HDR-enhancing gRNAs Targeting a MSH3 Gene

| S. pyogenes | A high level of orthogonality | | | |
|---|---|---|---|---|
| 2nd Tier | 65B | | | |
| gRNA | | | Target Site | |
| Name | DNA Strand | Targeting Domain | Length | Seq ID |
| MSH3-17 | − | AAGGAUGGCAGCCCGGCGGC | 20 | 1948 |
| MSH3-18 | + | ACGCCUGGGAACUGCGGCCG | 20 | 1949 |
| MSH3-19 | − | AGGAUGGCAGCCCGGCGGCA | 20 | 1950 |
| MSH3-20 | − | CAAAUGGGGACGAGGGGGGC | 20 | 1951 |
| MSH3-21 | + | CCCCGGCGCACGCAGGGUCG | 20 | 1952 |
| MSH3-22 | + | CCGCAGACGCCUGGGAACUG | 20 | 1953 |
| MSH3-23 | − | CCGCAGUUCCCAGGCGUCUG | 20 | 1954 |
| MSH3-24 | − | CCGCGACCCUGCGUGCGCCG | 20 | 1955 |
| MSH3-25 | − | CCUGCACAAAUGGGGACGAG | 20 | 1956 |
| MSH3-26 | − | CGACCCUGCGUGCGCCGGGG | 20 | 1957 |
| MSH3-27 | − | CGCAGGCUUCCGGCGAGACA | 20 | 1958 |
| MSH3-28 | − | CGCAGUUCCCAGGCGUCUGC | 20 | 1959 |
| MSH3-29 | − | CGCCGCGACCCUGCGUGCGC | 20 | 1960 |
| MSH3-30 | − | CGCCUGCACAAAUGGGGACG | 20 | 1961 |
| MSH3-31 | + | CGCCUGGGAACUGCGGCCGC | 20 | 1962 |
| MSH3-32 | + | CGUCCCCAUUUGUGCAGGCG | 20 | 1963 |
| MSH3-33 | + | CUUGCCCUGCCAUGUCUCGC | 20 | 1964 |
| MSH3-34 | + | UCAAGUUUGGCGCGAAAUUG | 20 | 1965 |
| MSH3-35 | + | UCUCGCCGGAAGCCUGCGUC | 20 | 1966 |
| MSH3-36 | − | UGGCGAGGAGCGCGAGCCCG | 20 | 1967 |

[0804] Table II.66 provides exemplary targeting domains of gRNAs to be used with an eiCas9 fusion molecule (e.g., an eiCas9 fused to a transcription activator or repressor domain) to alter (e.g., activate or repress) a gene, e.g., MSH3 gene. The targeting domains of gRNAs were selected according to the second tier parameters. The targeting domains bind within 500 bp spanning a transcription start site (TSS), e.g., upstream or downstream of a TSS, have a high level of orthogonality and PAM is NNGRRT. It is contemplated herein that in an embodiment the targeting domain hybridizes to the target domain through complementary base pairing. Any of the targeting domains in the table can be used with a S. aureus eiCas9 fusion molecule (e.g., an eiCas9 fused to a transcription activator or repressor domain) to alter (e.g., activate or repress) the MSH3 gene. One or more gRNA may be used to target an eiCas9 fusion molecule to a region spanning 500 bp of a transcription start site (TSS) of the MSH3 gene.

TABLE II.66
Exemplary HDR-enhancing gRNAs Targeting a MSH3 Gene

| S. aureus | A high level of orthogonality, and PAM is NNGRRT | | | |
|---|---|---|---|---|
| 2nd Tier | 66B | | | |
| gRNA | | | Target Site | |
| Name | DNA Strand | Targeting Domain | Length | Seq ID |
| MSH3-37 | + | CGCCCCCCCGCCCCGGCGCACG | 22 | 1968 |
| MSH3-38 | − | UUCCGGCGAGACAUGGCAGGGC | 22 | 1969 |

[0805] Table II.67A provides exemplary targeting domains of gRNAs to be used with an eiCas9 fusion molecule (e.g., an eiCas9 fused to a transcription activator or repressor domain) to alter (e.g., activate or repress) a gene, e.g., MSH6 gene. The targeting domains of gRNAs were selected according to the first tier parameters. The targeting domains bind within 500 bp spanning a transcription start site (TSS), e.g., upstream or downstream of a TSS, have a high level of orthogonality and start with a 5′G. It is contemplated herein that in an embodiment the targeting domain hybridizes to the target domain through complementary base pairing. Any of the targeting domains in the table can be used with a S. pyogenes eiCas9 fusion molecule (e.g., an eiCas9 fused to a transcription activator or repressor domain) to alter (e.g., activate or repress) the MSH6 gene. One or more gRNA may be used to target an eiCas9 fusion molecule to a region spanning 500 bp of a transcription start site (TSS) of the MSH6 gene.

TABLE II.67A
Exemplary HDR-enhancing gRNAs Targeting a MSH6 Gene

| S. pyogenes | A high level of orthogonality, and starts with a G | | | |
|---|---|---|---|---|
| 1st Tier | 67A | | | |
| gRNA | | | Target Site | |
| Name | DNA Strand | Targeting Domain | Length | Seq ID |
| MSH6-1 | − | GACGUGGGGAAGGGCGGGGC | 20 | 1970 |
| MSH6-2 | + | GCGCCUGUUGAUUGGCCACU | 20 | 1971 |
| MSH6-3 | − | GCGCGCGGCGACGUGGGGAA | 20 | 1972 |
| MSH6-4 | − | GCGCUCCGCCGGAGGAACCC | 20 | 1973 |
| MSH6-5 | − | GCGGCGACGUGGGGAAGGGC | 20 | 1974 |
| MSH6-6 | − | GCUCCUGCUGGCGGGAAAUC | 20 | 1975 |
| MSH6-7 | − | GCUGGCACACUGGUGGGUAG | 20 | 1976 |
| MSH6-8 | − | GGCACACUGGUGGGUAGGGG | 20 | 1977 |
| MSH6-9 | − | GGCCCCAGUGGCCAAUCAAC | 20 | 1978 |
| MSH6-10 | − | GGCGCCUCGCCGUGCGCGGG | 20 | 1979 |
| MSH6-11 | + | GGCGCCUGUUGAUUGGCCAC | 20 | 1980 |
| MSH6-12 | − | GGCGGGGCUGGCACACUGGU | 20 | 1981 |
| MSH6-13 | − | GGCUGGCACACUGGUGGGUA | 20 | 1982 |
| MSH6-14 | − | GGCUGGCACGCUGGCGGUGA | 20 | 1983 |
| MSH6-15 | − | GGGCUGGCACACUGGUGGGU | 20 | 1984 |
| MSH6-16 | − | GGGCUGGCACGCUGGCGGUG | 20 | 1985 |
| MSH6-17 | − | GGGGAGGCGCGCUCCGCCGG | 20 | 1986 |
| MSH6-18 | + | GUCGCCGCGCGCCCGGGGGC | 20 | 1987 |
| MSH6-19 | − | GUGCGCGGGCGGUGCGCGCC | 20 | 1988 |
| MSH6-20 | + | GUUGAUUGGCCACUGGGGCC | 20 | 1989 |

[0806] Table II.67B provides exemplary targeting domains of gRNAs to be used with an eiCas9 fusion molecule (e.g., an eiCas9 fused to a transcription activator or repressor domain) to alter (e.g., activate or repress) a gene, e.g., MSH6 gene. The targeting domains of gRNAs were selected according to the second tier parameters. The targeting domains bind within 500 bp spanning a transcription start site (TSS), e.g., upstream or downstream of a TSS and have a high level of orthogonality. It is contemplated herein that in an embodiment the targeting domain hybridizes to the target domain through complementary base pairing. Any of the targeting domains in the table can be used with a S. pyogenes eiCas9 fusion molecule (e.g., an eiCas9 fused to a transcription activator or repressor domain) to alter (e.g., activate or repress) the MSH6 gene. One or more gRNA may be used to target an eiCas9 fusion molecule to a region spanning 500 bp of a transcription start site (TSS) of the MSH6 gene.

TABLE II.67B
Exemplary HDR-enhancing gRNAs Targeting a MSH6 Gene

| S. pyogenes | A high level of orthogonality | | | |
|---|---|---|---|---|
| 2nd Tier | 67B | | | |
| gRNA | | | Target Site | |
| Name | DNA Strand | Targeting Domain | Length | Seq ID |
| MSH6-21 | − | AAAGCACCGCAUCUACCGCG | 20 | 1990 |
| MSH6-22 | − | AACAGGCGCCUCGCCGUGCG | 20 | 1991 |
| MSH6-23 | − | ACAGGCGCCUCGCCGUGCGC | 20 | 1992 |
| MSH6-24 | − | ACCGCGCGGCUCCUGCUGGC | 20 | 1993 |
| MSH6-25 | + | ACGGCGAGGCGCCUGUUGAU | 20 | 1994 |
| MSH6-26 | − | AUCUACCGCGCGGCUCCUGC | 20 | 1995 |
| MSH6-27 | + | CAGGAGCCGCGCGGUAGAUG | 20 | 1996 |
| MSH6-28 | + | CCCCCAGAUUUCCCGCCAGC | 20 | 1997 |
| MSH6-29 | − | CCCCCGGGCGCGCGGCGACG | 20 | 1998 |
| MSH6-30 | − | CCCCGGGCGCGCGGCGACGU | 20 | 1999 |
| MSH6-31 | + | CGCACCGCCCGCGCACGGCG | 20 | 2000 |
| MSH6-32 | + | CGCCUGUUGAUUGGCCACUG | 20 | 2001 |
| MSH6-33 | − | CGCGCUCCGCCGGAGGAACC | 20 | 2002 |
| MSH6-34 | − | CGCGGCGACGUGGGGAAGGG | 20 | 2003 |
| MSH6-35 | − | CGGAGGAACCCGGGCCCCAG | 20 | 2004 |
| MSH6-36 | + | CGUCGCCGCGCGCCCGGGGG | 20 | 2005 |
| MSH6-37 | − | CUGGCGGGAAAUCUGGGGGG | 20 | 2006 |
| MSH6-38 | − | UACCGCGCGGCUCCUGCUGG | 20 | 2007 |
| MSH6-39 | + | UGGCGCGCACCGCCCGCGCA | 20 | 2008 |
| MSH6-40 | + | UGGGGCCCGGGUUCCUCCGG | 20 | 2009 |

[0807] Table II.68A provides exemplary targeting domains of gRNAs to be used with an eiCas9 fusion molecule (e.g., an eiCas9 fused to a transcription activator or repressor domain) to alter (e.g., activate or repress) a gene, e.g., MSH6 gene. The targeting domains of gRNAs were selected according to the first tier parameters. The targeting domains bind within 500 bp spanning a transcription start site (TSS), e.g., upstream or downstream of a TSS, have a high level of orthogonality, start with a 5′G and PAM is NNGRRT. It is contemplated herein that in an embodiment the targeting domain hybridizes to the target domain through complementary base pairing. Any of the targeting domains in the table can be used with a S. aureus eiCas9 fusion molecule (e.g., an eiCas9 fused to a transcription activator or repressor domain) to alter (e.g., activate or repress) the MSH6 gene. One or more gRNA may be used to target an eiCas9 fusion molecule to a region spanning 500 bp of a transcription start site (TSS) of the MSH6 gene.

TABLE II.68A
Exemplary HDR-enhancing gRNA Targeting a MSH6 Gene

| S. aureus | A high level of orthogonality, starts with a G, PAM is NNGRRT | | | |
|---|---|---|---|---|
| 1st Tier | 68A | | | |
| gRNA | | | Target Site | Seq |
| Name | DNA Strand | Targeting Domain | Length | ID |
| MSH6-41 | − | GAAGGGCGGGGCUGGCACACUG | 22 | 2010 |

[0808] Table II.68B provides exemplary targeting domains of gRNAs to be used with an eiCas9 fusion molecule (e.g., an eiCas9 fused to a transcription activator or repressor domain) to alter (e.g., activate or repress) a gene, e.g., MSH6 gene. The targeting domains of gRNAs were selected according to the second tier parameters. The targeting domains bind within 500 bp spanning a transcription start site (TSS), e.g., upstream or downstream of a TSS, have a high level of orthogonality and PAM is NNGRRT. It is contemplated herein that in an embodiment the targeting domain hybridizes to the target domain through complementary base pairing. Any of the targeting domains in the table can be used with a S. aureus eiCas9 fusion molecule (e.g., an eiCas9 fused to a transcription activator or repressor domain) to alter (e.g., activate or repress) the MSH6 gene. One or more gRNA may be used to target an eiCas9 fusion molecule to a region spanning 500 bp of a transcription start site (TSS) of the MSH6 gene.

TABLE II.68B
Exemplary HDR-enhancing gRNAs Targeting a MSH6 Gene

| S. aureus | A high level of orthogonality, and PAM is NNGRRT | | | |
|---|---|---|---|---|
| 2nd Tier | 68B | | | |
| gRNA | | | Target Site | Seq |
| Name | DNA Strand | Targeting Domain | Length | ID |
| MSH6-42 | + | CCUGUUGAUUGGCCACUGGGGC | 22 | 2011 |

[0809] Table II.69A provides exemplary targeting domains of gRNAs to be used with an eiCas9 fusion molecule (e.g., an eiCas9 fused to a transcription activator or repressor domain) to alter (e.g., activate or repress) a gene, e.g., MlH1 gene. The targeting domains of gRNAs were selected according to the first tier parameters. The targeting domains bind within 500 bp spanning a transcription start site (TSS), e.g., upstream or downstream of a TSS, have a high level of orthogonality and start with a 5′G. It is contemplated herein that in an embodiment the targeting domain hybridizes to the target domain through complementary base pairing. Any of the targeting domains in the table can be used with a S. pyogenes eiCas9 fusion molecule (e.g., an eiCas9 fused to a transcription activator or repressor domain) to alter (e.g., activate or repress) the MlH1 gene. One or more gRNA may be used to target an eiCas9 fusion molecule to a region spanning 500 bp of a transcription start site (TSS) of the MlH1 gene.

TABLE II.69A
Exemplary HDR-enhancing gRNAs Targeting a MlH1 Gene

| S. pyogenes | A high level of orthogonality, and starts with a G | | | |
|---|---|---|---|---|
| 1st Tier | 69A | | | |
| gRNA | | | Target Site | |
| Name | DNA Strand | Targeting Domain | Length | Seq ID |
| MLH1-1 | + | GACAGUGGUGAACCGCAUCG | 20 | 2012 |
| MLH1-2 | − | GACUGGCACGUCAGGGAACC | 20 | 2013 |
| MLH1-3 | + | GCACGAGGCACUGAGGUGAU | 20 | 2014 |
| MLH1-4 | + | GCCAAAAUGUCGUUCGUGGC | 20 | 2015 |
| MLH1-5 | + | GCGCAAGCGCAUAUCCUUCU | 20 | 2016 |
| MLH1-6 | + | GCGCAUGCCCACAACGGCGG | 20 | 2017 |
| MLH1-7 | − | GCGCUGUACAUGCCUCUGCC | 20 | 2018 |
| MLH1-8 | + | GCGGACACGCCUCUUUGCCC | 20 | 2019 |
| MLH1-9 | − | GCUACUGCCCGCUACCUAGA | 20 | 2020 |
| MLH1-10 | + | GCUCCUAAAAACGAACCAAU | 20 | 2021 |
| MLH1-11 | − | GGAAACGUCUAGAUGCUCAA | 20 | 2022 |
| MLH1-12 | + | GGCAGGGGUUAUUCGGCGGC | 20 | 2023 |
| MLH1-13 | + | GGCCGCGUCACUCAAUGGCG | 20 | 2024 |
| MLH1-14 | + | GGUACGGAGGGAGUCGAGCC | 20 | 2025 |
| MLH1-15 | + | GGUGAACCGCAUCGCGGCGG | 20 | 2026 |
| MLH1-16 | + | GGUUCCCUGACGUGCCAGUC | 20 | 2027 |
| MLH1-17 | − | GGUUCGUUUUUAGGAGCUCG | 20 | 2028 |
| MLH1-18 | − | GUCCGCGCCAUUGAGUGACG | 20 | 2029 |
| MLH1-19 | + | GUCGAGCCGGGCUCACUUAA | 20 | 2030 |
| MLH1-20 | + | GUGGUGAACCGCAUCGCGGC | 20 | 2031 |

[0810] Table II.69B provides exemplary targeting domains of gRNAs to be used with an eiCas9 fusion molecule (e.g., an eiCas9 fused to a transcription activator or repressor domain) to alter (e.g., activate or repress) a gene, e.g., MlH1 gene. The targeting domains of gRNAs were selected according to the second tier parameters. The targeting domains bind within 500 bp spanning a transcription start site (TSS), e.g., upstream or downstream of a TSS and have a high level of orthogonality. It is contemplated herein that in an embodiment the targeting domain hybridizes to the target domain through complementary base pairing. Any of the targeting domains in the table can be used with a S. pyogenes eiCas9 fusion molecule (e.g., an eiCas9 fused to a transcription activator or repressor domain) to alter (e.g., activate or repress) the MlH1 gene. One or more gRNA may be used to target an eiCas9 fusion molecule to a region spanning 500 bp of a transcription start site (TSS) of the MlH1 gene.

TABLE II.69B
Exemplary HDR-enhancing gRNAs Targeting a MlH1 Gene

| S. pyogenes | A high level of orthogonality | | | |
|---|---|---|---|---|
| 2nd Tier | 69B | | | |
| gRNA | | | Target Site | |
| Name | DNA Strand | Targeting Domain | Length | Seq ID |
| MLH1-21 | + | ACAGCGCAUGCCCACAACGG | 20 | 2032 |
| MLH1-22 | + | ACUUAAGGGCUACGACUUAA | 20 | 2033 |
| MLH1-23 | + | AGUCGAGCCGGGCUCACUUA | 20 | 2034 |
| MLH1-24 | + | AGUGGUGAACCGCAUCGCGG | 20 | 2035 |
| MLH1-25 | + | AUGGCGUAAGCUACAGCUGA | 20 | 2036 |
| MLH1-26 | + | CCACAACGGCGGAGGCCGCC | 20 | 2037 |
| MLH1-27 | + | CCCACAACGGCGGAGGCCGC | 20 | 2038 |
| MLH1-28 | − | CCGGCGGCCUCCGCCGUUGU | 20 | 2039 |
| MLH1-29 | + | CGCAUAUCCUUCUAGGUAGC | 20 | 2040 |
| MLH1-30 | + | CGCGGACACGCCUCUUUGCC | 20 | 2041 |
| MLH1-31 | + | CGGCGGGGGAAGUUAUCCAG | 20 | 2042 |
| MLH1-32 | + | CGUUCGUGGCAGGGGUUAUU | 20 | 2043 |
| MLH1-33 | + | CUUAAGGGCUACGACUUAAC | 20 | 2044 |
| MLH1-34 | + | UAACGGGCCGCGUCACUCAA | 20 | 2045 |
| MLH1-35 | − | UAACUUCCCCCGCCGCGAUG | 20 | 2046 |
| MLH1-36 | + | UAGCGGGCAGUAGCCGCUUC | 20 | 2047 |
| MLH1-37 | + | UCGUGGCAGGGGUUAUUCGG | 20 | 2048 |
| MLH1-38 | − | UGAUAGCAUUAGCUGGCCGC | 20 | 2049 |
| MLH1-39 | + | UGGCGCCAAAAUGUCGUUCG | 20 | 2050 |
| MLH1-40 | + | UGGUGAACCGCAUCGCGGCG | 20 | 2051 |

[0811] Table II.70A provides exemplary targeting domains of gRNAs to be used with an eiCas9 fusion molecule (e.g., an eiCas9 fused to a transcription activator or repressor domain) to alter (e.g., activate or repress) a gene, e.g., MlH1 gene. The targeting domains of gRNAs were selected according to the first tier parameters. The targeting domains bind within 500 bp spanning a transcription start site (TSS), e.g., upstream or downstream of a TSS, have a high level of orthogonality, start with a 5′G and PAM is NNGRRT. It is contemplated herein that in an embodiment the targeting domain hybridizes to the target domain through complementary base pairing. Any of the targeting domains in the table can be used with a S. aureus eiCas9 fusion molecule (e.g., an eiCas9 fused to a transcription activator or repressor domain) to alter (e.g., activate or repress) the MlH1 gene. One or more gRNA may be used to target an eiCas9 fusion molecule to a region spanning 500 bp of a transcription start site (TSS) of the MlH1 gene.

TABLE II.70A
Exemplary HDR-enhancing gRNAs Targeting a MlH1 Gene

| S. aureus | A high level of orthogonality, starts with a G, PAM is NNGRRT | | | |
|---|---|---|---|---|
| 1st Tier | 70A | | | |
| gRNA | | | Target Site | |
| Name | DNA Strand | Targeting Domain | Length | Seq ID |
| MLH1-41 | + | GACGAAGAGACCCAGCAACCCA | 22 | 2052 |
| MLH1-42 | + | GAUGAUUGAGAACUGGUACGGA | 22 | 2053 |
| MLH1-43 | − | GCAAAGAGGCGUGUCCGCGCCA | 22 | 2054 |
| MLH1-44 | − | GCCAGUCAAAUUUCUCAACUCU | 22 | 2055 |
| MLH1-45 | + | GCGCCAAAAUGUCGUUCGUGGC | 22 | 2056 |
| MLH1-46 | − | GCGGCUACUGCCCGCUACCUAG | 22 | 2057 |
| MLH1-47 | + | GGGUUGUUUGGAGUGUAAGUGG | 22 | 2058 |
| MLH1-48 | + | GUCCAAUCAAUAGCUGCCGCUG | 22 | 2059 |

[0812] Table II.70B provides exemplary targeting domains of gRNAs to be used with an eiCas9 fusion molecule (e.g., an eiCas9 fused to a transcription activator or repressor domain) to alter (e.g., activate or repress) a gene, e.g., MlH1 gene. The targeting domains of gRNAs were selected according to the second tier parameters. The targeting domains bind within 500 bp spanning a transcription start site (TSS), e.g., upstream or downstream of a TSS, have a high level of orthogonality and PAM is NNGRRT. It is contemplated herein that in an embodiment the targeting domain hybridizes to the target domain through complementary base pairing. Any of the targeting domains in the table can be used with a S. aureus eiCas9 fusion molecule (e.g., an eiCas9 fused to a transcription activator or repressor domain) to alter (e.g., activate or repress) the MlH1 gene. One or more gRNA may be used to target an eiCas9 fusion molecule to a region spanning 500 bp of a transcription start site (TSS) of the MlH1 gene.

TABLE II.70B
Exemplary HDR-enhancing gRNAs Targeting a MlH1 Gene

| S. aureus | A high level of orthogonality, and PAM is NNGRRT | | | |
|---|---|---|---|---|
| 2nd Tier | 70B | | | |
| gRNA | | | Target Site | |
| Name | DNA Strand | Targeting Domain | Length | Seq ID |
| MLH1-49 | − | AAUUUCUCAACUCUGUGGGUUG | 22 | 2060 |
| MLH1-50 | + | AUGCCCACAACGGCGGAGGCCG | 22 | 2061 |
| MLH1-51 | + | CCGAGACCUUUUAAGGGUUGUU | 22 | 2062 |
| MLH1-52 | + | CCGCUCUCCCCCGAGACCUUUU | 22 | 2063 |
| MLH1-53 | − | CGGCAGCUAUUGAUUGGACAGC | 22 | 2064 |
| MLH1-54 | − | CUUUGAUAGCAUUAGCUGGCCG | 22 | 2065 |
| MLH1-55 | + | UAGCUGCCGCUGAAGGGUGGGG | 22 | 2066 |
| MLH1-56 | − | UCACCACUGUCUCGUCCAGCCG | 22 | 2067 |
| MLH1-57 | − | UUGGUUCGUUUUUAGGAGCUCG | 22 | 2068 |

[0813] Table II.71A provides exemplary targeting domains of gRNAs to be used with an eiCas9 fusion molecule (e.g., an eiCas9 fused to a transcription activator or repressor domain) to alter (e.g., activate or repress) a gene, e.g., PMS2 gene. The targeting domains of gRNAs were selected according to the first tier parameters. The targeting domains bind within 500 bp spanning a transcription start site (TSS), e.g., upstream or downstream of a TSS, have a high level of orthogonality and start with a 5′G. It is contemplated herein that in an embodiment the targeting domain hybridizes to the target domain through complementary base pairing. Any of the targeting domains in the table can be used with a S. pyogenes eiCas9 fusion molecule (e.g., an eiCas9 fused to a transcription activator or repressor domain) to alter (e.g., activate or repress) the PMS2 gene. One or more gRNA may be used to target an eiCas9 fusion molecule to a region spanning 500 bp of a transcription start site (TSS) of the PMS2 gene.

TABLE II.71A
Exemplary HDR-enhancing gRNAs Targeting a PMS2 Gene

| S. pyogenes | A high level of orthogonality, and starts with a G | | | |
|---|---|---|---|---|
| 1st Tier | 71A | | | |
| gRNA | | | Target Site | |
| Name | DNA Strand | Targeting Domain | Length | Seq ID |
| PMS2-1 | + | GACAGAGCCAAUAGGCGAAA | 20 | 2069 |
| PMS2-2 | − | GACUGGGAAAGUUCCCUCCA | 20 | 2070 |
| PMS2-3 | − | GCAACACCCGAUCCGCCUCG | 20 | 2071 |
| PMS2-4 | + | GCAGCCAAUGGGAGUUCAGG | 20 | 2072 |
| PMS2-5 | + | GCCAAUGGGAGUUCAGGAGG | 20 | 2073 |
| PMS2-6 | + | GCCGCCCCGCCCGGAAAGGG | 20 | 2074 |
| PMS2-7 | + | GCGCCUGUGGGAGCCCUGGA | 20 | 2075 |
| PMS2-8 | − | GGACUGGGAAAGUUCCCUCC | 20 | 2076 |
| PMS2-9 | + | GGGAACUUUCCCAGUCCCCG | 20 | 2077 |
| PMS2-10 | − | GUGCUCCACCCUUUCCGGGC | 20 | 2078 |
| PMS2-11 | − | GUUCCCUCCAGGGCUCCCAC | 20 | 2079 |

[0814] Table II.71B provides exemplary targeting domains of gRNAs to be used with an eiCas9 fusion molecule (e.g., an eiCas9 fused to a transcription activator or repressor domain) to alter (e.g., activate or repress) a gene, e.g., PMS2 gene. The targeting domains of gRNAs were selected according to the second tier parameters. The targeting domains bind within 500 bp spanning a transcription start site (TSS), e.g., upstream or downstream of a TSS and have a high level of orthogonality. It is contemplated herein that in an embodiment the targeting domain hybridizes to the target domain through complementary base pairing. Any of the targeting domains in the table can be used with a S. pyogenes eiCas9 fusion molecule (e.g., an eiCas9 fused to a transcription activator or repressor domain) to alter (e.g., activate or repress) the PMS2 gene. One or more gRNA may be used to target an eiCas9 fusion molecule to a region spanning 500 bp of a transcription start site (TSS) of the PMS2 gene.

TABLE II.71B
Exemplary HDR-enhancing gRNAs Targeting a PMS2 Gene

| S. pyogenes | A high level of orthogonality | | | |
|---|---|---|---|---|
| 2nd Tier | 71B | | | |
| gRNA | | | Target Site | |
| Name | DNA Strand | Targeting Domain | Length | Seq ID |
| PMS2-12 | + | AAAGCAGCCAAUGGGAGUUC | 20 | 2080 |
| PMS2-13 | − | ACCCGAUCCGCCUCGGGGAC | 20 | 2081 |
| PMS2-14 | + | AGCGCCUGUGGGAGCCCUGG | 20 | 2082 |
| PMS2-15 | + | AGUAUUUUUGCCGCCCCGCC | 20 | 2083 |
| PMS2-16 | − | AUGCAACACCCGAUCCGCCU | 20 | 2084 |
| PMS2-17 | − | CCCGAUCCGCCUCGGGGACU | 20 | 2085 |
| PMS2-18 | + | CGACCUUUGACAGAGCCAAU | 20 | 2086 |
| PMS2-19 | + | CGGAGCGCCUGUGGGAGCCC | 20 | 2087 |
| PMS2-20 | + | CGGAUCGGGUGUUGCAUCCA | 20 | 2088 |
| PMS2-21 | + | CGGUGUGCUCUGAUUGGCCC | 20 | 2089 |
| PMS2-22 | − | CUUCGUGACGUCAAAGAGCC | 20 | 2090 |
| PMS2-23 | + | UCAGGAGGCGGAGCGCCUGU | 20 | 2091 |
| PMS2-24 | + | UCCCAGUCCCCGAGGCGGAU | 20 | 2092 |
| PMS2-25 | − | UCCGCCUCCUGAACUCCCAU | 20 | 2093 |
| PMS2-26 | − | UCGCCUAUUGGCUCUGUCAA | 20 | 2094 |
| PMS2-27 | − | UGCAACACCCGAUCCGCCUC | 20 | 2095 |
| PMS2-28 | + | UUCAGGAGGCGGAGCGCCUG | 20 | 2096 |
| PMS2-29 | − | UUCGUGACGUCAAAGAGCCU | 20 | 2097 |
| PMS2-30 | + | UUUGCCGCCCCGCCCGGAAA | 20 | 2098 |
| PMS2-31 | + | UUUUGCCGCCCCGCCCGGAA | 20 | 2099 |

[0815] Table II.72A provides exemplary targeting domains of gRNAs to be used with an eiCas9 fusion molecule (e.g., an eiCas9 fused to a transcription activator or repressor domain) to alter (e.g., activate or repress) a gene, e.g., PMS2 gene. The targeting domains of gRNAs were selected according to the first tier parameters. The targeting domains bind within 500 bp spanning a transcription start site (TSS), e.g., upstream or downstream of a TSS, have a high level of orthogonality, start with a 5′G and PAM is NNGRRT. It is contemplated herein that in an embodiment the targeting domain hybridizes to the target domain through complementary base pairing. Any of the targeting domains in the table can be used with a S. aureus eiCas9 fusion molecule (e.g., an eiCas9 fused to a transcription activator or repressor domain) to alter (e.g., activate or repress) the PMS2 gene. One or more gRNA may be used to target an eiCas9 fusion molecule to a region spanning 500 bp of a transcription start site (TSS) of the PMS2 gene.

TABLE II.72A
Exemplary HDR-enhancing gRNA Targeting a PMS2 Gene

| S. aureus | A high level of orthogonality,starts with a G, PAM is NNGRRT | | | |
|---|---|---|---|---|
| 1st Tier | 72A | | | |
| gRNA | | | Target Site | |
| Name | DNA Strand | Targeting Domain | Length | Seq ID |
| PMS2-32 | + | GGGAACUUUCCCAGUCCCCGAG | 22 | 2100 |

[0816] Table II.72B provides exemplary targeting domains of gRNAs to be used with an eiCas9 fusion molecule (e.g., an eiCas9 fused to a transcription activator or repressor domain) to alter (e.g., activate or repress) a gene, e.g., PMS2 gene. The targeting domains of gRNAs were selected according to the second tier parameters. The targeting domains bind within 500 bp spanning a transcription start site (TSS), e.g., upstream or downstream of a TSS, have a high level of orthogonality and PAM is NNGRRT. It is contemplated herein that in an embodiment the targeting domain hybridizes to the target domain through complementary base pairing. Any of the targeting domains in the table can be used with a S. aureus eiCas9 fusion molecule (e.g., an eiCas9 fused to a transcription activator or repressor domain) to alter (e.g., activate or repress) the PMS2 gene. One or more gRNA may be used to target an eiCas9 fusion molecule to a region spanning 500 bp of a transcription start site (TSS) of the PMS2 gene.

TABLE II.72B
Exemplary HDR-enhancing gRNAs Targeting a PMS2 Gene

| S. aureus | A high level of orthogonality, and PAM is NNGRRT | | | |
|---|---|---|---|---|
| 2nd Tier | 72B | | | |
| gRNA | | | Target Site | |
| Name | DNA Strand | Targeting Domain | Length | Seq ID |
| PMS2-33 | + | CACAACGUCGAAAGCAGCCAAU | 22 | 2101 |
| PMS2-34 | + | CUUUCCCAGUCCCCGAGGCGGA | 22 | 2102 |
| PMS2-35 | + | UAUUUUUGCCGCCCCGCCCGGA | 22 | 2103 |

[0817] Table II.73A provides exemplary targeting domains of gRNAs to be used with an eiCas9 fusion molecule (e.g., an eiCas9 fused to a transcription activator or repressor domain) to alter (e.g., activate or repress) a gene, e.g., EZH2 gene. The targeting domains of gRNAs were selected according to the first tier parameters. The targeting domains bind within 500 bp spanning a transcription start site (TSS), e.g., upstream or downstream of a TSS, have a high level of orthogonality and start with a 5′G. It is contemplated herein that in an embodiment the targeting domain hybridizes to the target domain through complementary base pairing. Any of the targeting domains in the table can be used with a S. pyogenes eiCas9 fusion molecule (e.g., an eiCas9 fused to a transcription activator or repressor domain) to alter (e.g., activate or repress) the EZH2 gene. One or more gRNA may be used to target an eiCas9 fusion molecule to a region spanning 500 bp of a transcription start site (TSS) of the EZH2 gene.

TABLE II.73A
Exemplary HDR-enhancing gRNAs Targeting a EZH2 Gene

| S. pyogenes | A high level of orthogonality, and starts with a G | | | |
|---|---|---|---|---|
| 1st Tier | 73A | | | |
| gRNA | | | Target Site | |
| Name | DNA Strand | Targeting Domain | Length | Seq ID |
| EZH2-1 | + | GAACAACGCGAGUCGGCGCG | 20 | 2104 |
| EZH2-2 | + | GACACCCGGUGGGACUCAGA | 20 | 2105 |
| EZH2-3 | + | GAGUGCGAACCGGGCGGCGG | 20 | 2106 |
| EZH2-4 | + | GCCACUGCUGUGCCGGUCCC | 20 | 2107 |
| EZH2-5 | − | GCCCCGAUUGGCGGGACGCG | 20 | 2108 |
| EZH2-6 | + | GCCGCGUUUGGCGCUCGGUC | 20 | 2109 |
| EZH2-7 | + | GCCUCGCGUCCCGCCAAUCG | 20 | 2110 |
| EZH2-8 | + | GCGGCGCUUGAUUGGGCUGG | 20 | 2111 |
| EZH2-9 | − | GCGGGCGCCCGUCCAAUCAC | 20 | 2112 |
| EZH2-10 | − | GGACCGGCACAGCAGUGGCG | 20 | 2113 |
| EZH2-11 | + | GGCGAUUGGGCUGCCGCGUU | 20 | 2114 |
| EZH2-12 | + | GGCGGCGCUUGAUUGGGCUG | 20 | 2115 |
| EZH2-13 | + | GGGCGGCGCUUGAUUGGGCU | 20 | 2116 |
| EZH2-14 | + | GGGCUCCGGGAGUGCGAACC | 20 | 2117 |
| EZH2-15 | + | GGGCUGCCGCGUUUGGCGCU | 20 | 2118 |
| EZH2-16 | + | GGGGCGGCGCUUGAUUGGGC | 20 | 2119 |
| EZH2-17 | + | GGGGCUCCGGGAGUGCGAAC | 20 | 2120 |
| EZH2-18 | + | GGGGGGCCAAAUAAAAGCGA | 20 | 2121 |
| EZH2-19 | + | GGUCGCGUCCGACACCCGGU | 20 | 2122 |
| EZH2-20 | + | GUCCGGUCGCGUCCGACACC | 20 | 2123 |

[0818] Table II.73B provides exemplary targeting domains of gRNAs to be used with an eiCas9 fusion molecule (e.g., an eiCas9 fused to a transcription activator or repressor domain) to alter (e.g., activate or repress) a gene, e.g., EZH2 gene. The targeting domains of gRNAs were selected according to the second tier parameters. The targeting domains bind within 500 bp spanning a transcription start site (TSS), e.g., upstream or downstream of a TSS and have a high level of orthogonality. It is contemplated herein that in an embodiment the targeting domain hybridizes to the target domain through complementary base pairing. Any of the targeting domains in the table can be used with a S. pyogenes eiCas9 fusion molecule (e.g., an eiCas9 fused to a transcription activator or repressor domain) to alter (e.g., activate or repress) the EZH2 gene. One or more gRNA may be used to target an eiCas9 fusion molecule to a region spanning 500 bp of a transcription start site (TSS) of the EZH2 gene.

TABLE II.73B
Exemplary HDR-enhancing gRNAs Targeting a EZH2 Gene

| S. pyogenes | A high level of orthogonality | | | |
|---|---|---|---|---|
| 2nd Tier | 73B | | | |
| gRNA | | | Target Site | |
| Name | DNA Strand | Targeting Domain | Length | Seq ID |
| EZH2-21 | + | AACAACGCGAGUCGGCGCGC | 20 | 2124 |
| EZH2-22 | + | AAUCGGGGCGGCGCUUGAUU | 20 | 2125 |
| EZH2-23 | − | ACCGGACCGAGCGCCAAACG | 20 | 2126 |
| EZH2-24 | + | ACGAAGGUAACGCGCCGCUG | 20 | 2127 |
| EZH2-25 | + | AGGUAACGCGCCGCUGCGGG | 20 | 2128 |
| EZH2-26 | − | CAAGCGCCGCCCCGAUUGGC | 20 | 2129 |
| EZH2-27 | − | CAAUCAAGCGCCGCCCCGAU | 20 | 2130 |
| EZH2-28 | − | CAAUCGCCAUCGCUUUUAUU | 20 | 2131 |
| EZH2-29 | + | CAAUCGGGGCGGCGCUUGAU | 20 | 2132 |
| EZH2-30 | − | CACCGGGUGUCGGACGCGAC | 20 | 2133 |
| EZH2-31 | − | CCGAUUGGCGGGACGCGAGG | 20 | 2134 |
| EZH2-32 | + | CCGCCUCGCGUCCCGCCAAU | 20 | 2135 |
| EZH2-33 | + | CGAGUCGGCGCGCGGGACGA | 20 | 2136 |
| EZH2-34 | − | CGAUUGGCGGGACGCGAGGC | 20 | 2137 |
| EZH2-35 | − | CGCCGCCCGGUUCGCACUCC | 20 | 2138 |
| EZH2-36 | + | CGCCUCGCGUCCCGCCAAUC | 20 | 2139 |
| EZH2-37 | + | CGCGCGGGAACAACGCGAGU | 20 | 2140 |
| EZH2-38 | + | CGGUCGCGUCCGACACCCGG | 20 | 2141 |
| EZH2-39 | − | UCAAGCGCCGCCCCGAUUGG | 20 | 2142 |
| EZH2-40 | + | UCGCGUCCCGCCAAUCGGGG | 20 | 2143 |

[0819] Table II.74A provides exemplary targeting domains of gRNAs to be used with an eiCas9 fusion molecule (e.g., an eiCas9 fused to a transcription activator or repressor domain) to alter (e.g., activate or repress) a gene, e.g., EZH2 gene. The targeting domains of gRNAs were selected according to the first tier parameters. The targeting domains bind within 500 bp spanning a transcription start site (TSS), e.g., upstream or downstream of a TSS, have a high level of orthogonality, start with a 5′G and PAM is NNGRRT. It is contemplated herein that in an embodiment the targeting domain hybridizes to the target domain through complementary base pairing. Any of the targeting domains in the table can be used with a S. aureus eiCas9 fusion molecule (e.g., an eiCas9 fused to a transcription activator or repressor domain) to alter (e.g., activate or repress) the EZH2 gene. One or more gRNA may be used to target an eiCas9 fusion molecule to a region spanning 500 bp of a transcription start site (TSS) of the EZH2 gene.

TABLE II.74A
Exemplary HDR-enhancing gRNAs Targeting a EZH2 Gene

| S. aureus | A high level of orthogonality,starts with a G, PAM is NNGRRT | | | |
|---|---|---|---|---|
| 1st Tier | 74A | | | |
| gRNA | | | Target Site | |
| Name | DNA Strand | Targeting Domain | Length | Seq ID |
| EZH2-41 | − | GCCGCCGGGGCUCCACUGCCUU | 22 | 2144 |
| EZH2-42 | + | GCGGCCCGGCCGGCGGGGCUCC | 22 | 2145 |
| EZH2-43 | + | GGGGGCGACGCGCGGGAACAAC | 22 | 2146 |

[0820] Table II.74B provides exemplary targeting domains of gRNAs to be used with an eiCas9 fusion molecule (e.g., an eiCas9 fused to a transcription activator or repressor domain) to alter (e.g., activate or repress) a gene, e.g., EZH2 gene. The targeting domains of gRNAs were selected according to the second tier parameters. The targeting domains bind within 500 bp spanning a transcription start site (TSS), e.g., upstream or downstream of a TSS, have a high level of orthogonality and PAM is NNGRRT. It is contemplated herein that in an embodiment the targeting domain hybridizes to the target domain through complementary base pairing. Any of the targeting domains in the table can be used with a S. aureus eiCas9 fusion molecule (e.g., an eiCas9 fused to a transcription activator or repressor domain) to alter (e.g., activate or repress) the EZH2 gene. One or more gRNA may be used to target an eiCas9 fusion molecule to a region spanning 500 bp of a transcription start site (TSS) of the EZH2 gene.

TABLE II.74B
Exemplary HDR-enhancing gRNAs Targeting a EZH2 Gene

| S. aureus | A high level of orthogonality, and PAM is NNGRRT | | | |
|---|---|---|---|---|
| 2nd Tier | 74B | | | |
| gRNA | | | Target Site | |
| Name | DNA Strand | Targeting Domain | Length | Seq ID |
| EZH2-44 | + | CCCCGCCACUGCUGUGCCGGUC | 22 | 2147 |
| EZH2-45 | − | CUCCACUGCCUUCUGAGUCCCA | 22 | 2148 |

[0821] Table II.75A provides exemplary targeting domains of gRNAs to be used with an eiCas9 fusion molecule (e.g., an eiCas9 fused to a transcription activator or repressor domain) to alter (e.g., activate or repress) a gene, e.g., KDM4A (also referred to JMJD2A) gene. The targeting domains of gRNAs were selected according to the first tier parameters. The targeting domains bind within 500 bp spanning a transcription start site (TSS), e.g., upstream or downstream of a TSS, have a high level of orthogonality and start with a 5′G. It is contemplated herein that in an embodiment the targeting domain hybridizes to the target domain through complementary base pairing. Any of the targeting domains in the table can be used with a S. pyogenes eiCas9 fusion molecule (e.g., an eiCas9 fused to a transcription activator or repressor domain) to alter (e.g., activate or repress) the KDM4A (also referred to JMJD2A) gene. One or more gRNA may be used to target an eiCas9 fusion molecule to a region spanning 500 bp of a transcription start site (TSS) of the KDM4A (also referred to JMJD2A) gene.

TABLE II.75A
Exemplary HDR-enhancing gRNAs Targeting a KDM4A Gene

| | A high level of orthogonality, and starts with a G | | | |
|---|---|---|---|---|
| S. pyogenes | 75A | | | |
| 1st Tier | | | Target Site | |
| gRNA Name | DNA Strand | Targeting Domain | Length | Seq ID |
| KDM4A-1 | + | GAGCUGAGCCUAAGCCCUGG | 20 | 2149 |
| KDM4A-2 | + | GAGUUUCGGCCUUCGCCUGC | 20 | 2150 |
| KDM4A-3 | − | GAUCCUACUGCUUUUCCAGC | 20 | 2151 |
| KDM4A-4 | + | GAUCGGCCAGUGGCGACAGC | 20 | 2152 |
| KDM4A-5 | + | GAUGCCGACUUUAGAGGAGG | 20 | 2153 |
| KDM4A-6 | + | GCAGAUGCCGACUUUAGAGG | 20 | 2154 |
| KDM4A-7 | + | GCUGAGCCUAAGCCCUGGCG | 20 | 2155 |
| KDM4A-8 | + | GCUUGCAGCCACCCUUGAAU | 20 | 2156 |
| KDM4A-9 | + | GGCUGUAGGUGAGAACUAUA | 20 | 2157 |
| KDM4A-10 | + | GGGCUGUAGGUGAGAACUAU | 20 | 2158 |
| KDM4A-11 | − | GUACAGAGUCAACCAAUUCA | 20 | 2159 |

[0822] Table II.75B provides exemplary targeting domains of gRNAs to be used with an eiCas9 fusion molecule (e.g., an eiCas9 fused to a transcription activator or repressor domain) to alter (e.g., activate or repress) a gene, e.g., KDM4A (also referred to JMJD2A) gene. The targeting domains of gRNAs were selected according to the second tier parameters. The targeting domains bind within 500 bp spanning a transcription start site (TSS), e.g., upstream or downstream of a TSS and have a high level of orthogonality. It is contemplated herein that in an embodiment the targeting domain hybridizes to the target domain through complementary base pairing. Any of the targeting domains in the table can be used with a S. pyogenes eiCas9 fusion molecule (e.g., an eiCas9 fused to a transcription activator or repressor domain) to alter (e.g., activate or repress) the KDM4A (also referred to JMJD2A) gene. One or more gRNA may be used to target an eiCas9 fusion molecule to a region spanning 500 bp of a transcription start site (TSS) of the KDM4A (also referred to JMJD2A) gene.

TABLE II.75B
Exemplary HDR-enhancing gRNAs Targeting a KDM4A Gene

| | A high level of orthogonality | | | |
|---|---|---|---|---|
| S. pyogenes | 75B | | | |
| 2nd Tier | | | Target Site | |
| gRNA Name | DNA Strand | Targeting Domain | Length | Seq ID |
| KDM4A-12 | + | AAAGCAGUAGGAUCGGCCAG | 20 | 2160 |
| KDM4A-13 | − | AACUCCGCCUCCUCUAAAGU | 20 | 2161 |
| KDM4A-14 | − | ACUGCUUUUCCAGCAGGCGA | 20 | 2162 |
| KDM4A-15 | − | AGAGUCAACCAAUUCAAGGG | 20 | 2163 |
| KDM4A-16 | + | AGCUGAGCCUAAGCCCUGGC | 20 | 2164 |
| KDM4A-17 | − | CCAAAGCCCCGCCAGGGCUU | 20 | 2165 |
| KDM4A-18 | + | CCUAAGCCCUGGCGGGGCUU | 20 | 2166 |
| KDM4A-19 | + | CGUGCUCAUUGGCUGGUGUA | 20 | 2167 |
| KDM4A-20 | + | CUAAGCCCUGGCGGGGCUUU | 20 | 2168 |
| KDM4A-21 | − | CUACAGCCCAAAGCCCCGCC | 20 | 2169 |
| KDM4A-22 | + | CUGGCGGGGCUUUGGGCUGU | 20 | 2170 |
| KDM4A-23 | + | CUUUAGAGGAGGCGGAGUUU | 20 | 2171 |
| KDM4A-24 | − | UACAGAGUCAACCAAUUCAA | 20 | 2172 |
| KDM4A-25 | − | UACAGCCCAAAGCCCCGCCA | 20 | 2173 |
| KDM4A-26 | − | UCAGCUCCUGCUGUCGCCAC | 20 | 2174 |
| KDM4A-27 | + | UCGCCUGCUGGAAAAGCAGU | 20 | 2175 |
| KDM4A-28 | + | UGCGCAGAUGCCGACUUUAG | 20 | 2176 |
| KDM4A-29 | + | UGCGGCGCGUGCUCAUUGGC | 20 | 2177 |
| KDM4A-30 | + | UGCUGGAAAAGCAGUAGGAU | 20 | 2178 |
| KDM4A-31 | + | UGGCUGCGGCGCGUGCUCAU | 20 | 2179 |

[0823] Table II.76A provides exemplary targeting domains of gRNAs to be used with an eiCas9 fusion molecule (e.g., an eiCas9 fused to a transcription activator or repressor domain) to alter (e.g., activate or repress) a gene, e.g., KDM4A (also referred to JMJD2A) gene. The targeting domains of gRNAs were selected according to the first tier parameters. The targeting domains bind within 500 bp spanning a transcription start site (TSS), e.g., upstream or downstream of a TSS, have a high level of orthogonality, start with a 5′G and PAM is NNGRRT. It is contemplated herein that in an embodiment the targeting domain hybridizes to the target domain through complementary base pairing. Any of the targeting domains in the table can be used with a S. aureus eiCas9 fusion molecule (e.g., an eiCas9 fused to a transcription activator or repressor domain) to alter (e.g., activate or repress) the KDM4A (also referred to JMJD2A) gene. One or more gRNA may be used to target an eiCas9 fusion molecule to a region spanning 500 bp of a transcription start site (TSS) of the KDM4A (also referred to JMJD2A) gene.

TABLE II.76A
Exemplary HDR-enhancing gRNAs Targeting a KDM4A Gene

| | A high level of orthogonality, | | | |
|---|---|---|---|---|
| | starts with a G, PAM is NNGRRT | | | |
| S. aureus | 76A | | | |
| 1st Tier | | | Target Site | |
| gRNA Name | DNA Strand | Targeting Domain | Length | Seq ID |
| KDM4A-32 | − | GCCGUACAGAGUCAACCAAUUC | 22 | 2180 |
| KDM4A-33 | + | GGUGUAUGGCUUGCAGCCACCC | 22 | 2181 |

[0824] Table II.76B provides exemplary targeting domains of gRNAs to be used with an eiCas9 fusion molecule (e.g., an eiCas9 fused to a transcription activator or repressor domain) to alter (e.g., activate or repress) a gene, e.g., KDM4A (also referred to JMJD2A) gene. The targeting domains of gRNAs were selected according to the second tier parameters. The targeting domains bind within 500 bp spanning a transcription start site (TSS), e.g., upstream or downstream of a TSS, have a high level of orthogonality and PAM is NNGRRT. It is contemplated herein that in an embodiment the targeting domain hybridizes to the target domain through complementary base pairing. Any of the targeting domains in the table can be used with a S. aureus eiCas9 fusion molecule (e.g., an eiCas9 fused to a transcription activator or repressor domain) to alter (e.g., activate or repress) the KDM4A (also referred to JMJD2A) gene. One or more gRNA may be used to target an eiCas9 fusion molecule to a region spanning 500 bp of a transcription start site (TSS) of the KDM4A (also referred to JMJD2A) gene.

TABLE II.76B
Exemplary HDR-enhancing gRNAs Targeting a KDM4A Gene

| | A high level of orthogonality, and PAM is NNGRRT | | | |
|---|---|---|---|---|
| S. aureus | 76B | | | |
| 2nd Tier | | | Target Site | |
| gRNA Name | DNA Strand | Targeting Domain | Length | Seq ID |
| KDM4A-34 | − | AGUCGGCAUCUGCGCAGCCGUA | 22 | 2182 |
| KDM4A-35 | + | CAGAUGCCGACUUUAGAGGAGG | 22 | 2183 |
| KDM4A-36 | + | CCUUCGCCUGCUGGAAAAGCAG | 22 | 2184 |
| KDM4A-37 | + | UUUGGGCUGUAGGUGAGAACUA | 22 | 2185 |

[0825] Table II.77A provides exemplary targeting domains of gRNAs to be used with an eiCas9 fusion molecule (e.g., an eiCas9 fused to a transcription activator or repressor domain) to alter (e.g., activate or repress) a gene, e.g., CDK gene. The targeting domains of gRNAs were selected according to the first tier parameters. The targeting domains bind within 500 bp spanning a transcription start site (TSS), e.g., upstream or downstream of a TSS, have a high level of orthogonality and start with a 5′G. It is contemplated herein that in an embodiment the targeting domain hybridizes to the target domain through complementary base pairing. Any of the targeting domains in the table can be used with a S. pyogenes eiCas9 fusion molecule (e.g., an eiCas9 fused to a transcription activator or repressor domain) to alter (e.g., activate or repress) the CDK gene. One or more gRNA may be used to target an eiCas9 fusion molecule to a region spanning 500 bp of a transcription start site (TSS) of the CDK gene.

TABLE II.77A
Exemplary HDR-enhancing gRNAs Targeting a CDK Gene

| | A high level of orthogonality, and starts with a G | | | |
|---|---|---|---|---|
| S. pyogenes | 77A | | | |
| 1st Tier | | | Target Site | |
| gRNA Name | DNA Strand | Targeting Domain | Length | Seq ID |
| CDK1-1 | + | GAAGGCCUGCCCAGCGUAGC | 20 | 2186 |
| CDK1-2 | + | GAAUAAUAAGCCGGGUACAG | 20 | 2187 |
| CDK1-3 | + | GAAUCCGGGGCCCUUUAGCG | 20 | 2188 |
| CDK1-4 | + | GACGACACUCUCCCGACUGG | 20 | 2189 |
| CDK1-5 | − | GAGCGCGAAAGAAAGAGGAA | 20 | 2190 |
| CDK1-6 | − | GCAAGCGCUCUCCUCCAGUC | 20 | 2191 |
| CDK1-7 | + | GCCGCCGCGGAAUAAUAAGC | 20 | 2192 |
| CDK1-8 | − | GCGAAAGAAAGAGGAAAGGG | 20 | 2193 |
| CDK1-9 | − | GCGGCUAGAGAAAAAGCAGG | 20 | 2194 |
| CDK1-10 | + | GCUACCCGAUUGGUGAAUCC | 20 | 2195 |
| CDK1-11 | + | GCUGGCUCUUGGAAAUUGAG | 20 | 2196 |
| CDK1-12 | − | GCUGGGCAGGCCUUCCCGGG | 20 | 2197 |
| CDK1-13 | + | GGCUACCCGAUUGGUGAAUC | 20 | 2198 |
| CDK1-14 | − | GGCUAGAGCGCGAAAGAAAG | 20 | 2199 |
| CDK1-15 | − | GGGCCCCGGAUUCACCAAUC | 20 | 2200 |
| CDK1-16 | + | GGGGUCAGGGUCGUGUCUAG | 20 | 2201 |
| CDK1-17 | + | GGGUACAGUGGCUGGGGUCA | 20 | 2202 |
| CDK1-18 | + | GGUUGUUGUAGCUGCCGCUG | 20 | 2203 |
| CDK1-19 | − | GUACCCGGCUUAUUAUUCCG | 20 | 2204 |
| CDK1-20 | − | GUCCUACUGUUUCUAGUCAG | 20 | 2205 |

[0826] Table II.77B provides exemplary targeting domains of gRNAs to be used with an eiCas9 fusion molecule (e.g., an eiCas9 fused to a transcription activator or repressor domain) to alter (e.g., activate or repress) a gene, e.g., CDK gene. The targeting domains of gRNAs were selected according to the second tier parameters. The targeting domains bind within 500 bp spanning a transcription start site (TSS), e.g., upstream or downstream of a TSS and have a high level of orthogonality. It is contemplated herein that in an embodiment the targeting domain hybridizes to the target domain through complementary base pairing. Any of the targeting domains in the table can be used with a S. pyogenes eiCas9 fusion molecule (e.g., an eiCas9 fused to a transcription activator or repressor domain) to alter (e.g., activate or repress) the CDK gene (e.g., a CDK1 gene). One or more gRNA may be used to target an eiCas9 fusion molecule to a region spanning 500 bp of a transcription start site (TSS) of the CDK gene.

TABLE II.77B
Exemplary HDR-enhancing gRNAs Targeting a CDK Gene

| | A high level of orthogonality | | | |
|---|---|---|---|---|
| S. pyogenes | 77B | | | |
| 2nd Tier | | | Target Site | |
| gRNA Name | DNA Strand | Targeting Domain | Length | Seq ID |
| CDK1-21 | + | AAAUUGAGCGGAGAGCGACG | 20 | 2206 |
| CDK1-22 | + | AAGUCUACGGGCUACCCGAU | 20 | 2207 |
| CDK1-23 | + | AGUUUGAAACUGCUCGCACU | 20 | 2208 |
| CDK1-24 | − | CAAUCAGAGCCCAGCUACGC | 20 | 2209 |
| CDK1-25 | − | CCCGGCUUAUUAUUCCGCGG | 20 | 2210 |
| CDK1-26 | + | CCGCCGCGGAAUAAUAAGCC | 20 | 2211 |
| CDK1-27 | − | CGCAAGCGCUCUCCUCCAGU | 20 | 2212 |
| CDK1-28 | + | CGCGCUCUAGCCACCCGGGA | 20 | 2213 |
| CDK1-29 | + | CGCUUGCGCUCGCACUCAGU | 20 | 2214 |
| CDK1-30 | + | CUACCCGAUUGGUGAAUCCG | 20 | 2215 |
| CDK1-31 | − | CUACGCUGGGCAGGCCUUCC | 20 | 2216 |
| CDK1-32 | − | CUCACCGCGCUAAAGGGCCC | 20 | 2217 |
| CDK1-33 | + | CUCCGCUGACUAGAAACAGU | 20 | 2218 |
| CDK1-34 | + | CUUUCGCGCUCUAGCCACCC | 20 | 2219 |
| CDK1-35 | + | UAGGACGACACUCUCCCGAC | 20 | 2220 |
| CDK1-36 | + | UCUUUCGCGCUCUAGCCACC | 20 | 2221 |
| CDK1-37 | + | UGGGGUCAGGGUCGUGUCUA | 20 | 2222 |
| CDK1-38 | − | UUAUUCCGCGGCGGCCGCAG | 20 | 2223 |
| CDK1-39 | − | UUCAAACUCACCGCGCUAAA | 20 | 2224 |
| CDK1-40 | − | UUUCAAACUCACCGCGCUAA | 20 | 2225 |

[0827] Table II.78A provides exemplary targeting domains of gRNAs to be used with an eiCas9 fusion molecule (e.g., an eiCas9 fused to a transcription activator or repressor domain) to alter (e.g., activate or repress) a gene, e.g., CDK gene. The targeting domains of gRNAs were selected according to the first tier parameters. The targeting domains bind within 500 bp spanning a transcription start site (TSS), e.g., upstream or downstream of a TSS, have a high level of orthogonality, start with a 5′G and PAM is NNGRRT. It is contemplated herein that in an embodiment the targeting domain hybridizes to the target domain through complementary base pairing. Any of the targeting domains in the table can be used with a S. aureus eiCas9 fusion molecule (e.g., an eiCas9 fused to a transcription activator or repressor domain) to alter (e.g., activate or repress) the CDK gene. One or more gRNA may be used to target an eiCas9 fusion molecule to a region spanning 500 bp of a transcription start site (TSS) of the CDK gene.

TABLE II.78A
Exemplary HDR-enhancing gRNAs Targeting a CDK Gene

| | A high level of orthogonality, | | | |
|---|---|---|---|---|
| | starts with a G, PAM is NNGRRT | | | |
| S. aureus | 78A | | | |
| 1st Tier | | | Target Site | |
| gRNA Name | DNA Strand | Targeting Domain | Length | Seq ID |
| CDK1-41 | + | GAAUCCGGGGCCCUUUAGCGCG | 22 | 2226 |
| CDK1-42 | − | GCAAGCGCUCUCCUCCAGUCGG | 22 | 2227 |
| CDK1-43 | + | GCGGCCGCCGCGGAAUAAUAAG | 22 | 2228 |
| CDK1-44 | + | GUAGCUGCCGCUGCGGCCGCCG | 22 | 2229 |

[0828] Table II.78B provides exemplary targeting domains of gRNAs to be used with an eiCas9 fusion molecule (e.g., an eiCas9 fused to a transcription activator or repressor domain) to alter (e.g., activate or repress) a gene, e.g., CDK gene. The targeting domains of gRNAs were selected according to the second tier parameters. The targeting domains bind within 500 bp spanning a transcription start site (TSS), e.g., upstream or downstream of a TSS, have a high level of orthogonality and PAM is NNGRRT. It is contemplated herein that in an embodiment the targeting domain hybridizes to the target domain through complementary base pairing. Any of the targeting domains in the table can be used with a S. aureus eiCas9 fusion molecule (e.g., an eiCas9 fused to a transcription activator or repressor domain) to alter (e.g., activate or repress) the CDK gene. One or more gRNA may be used to target an eiCas9 fusion molecule to a region spanning 500 bp of a transcription start site (TSS) of the CDK gene.

TABLE II.78B
Exemplary HDR-enhancing gRNAs Targeting a CDK Gene

| | A high level of orthogonality, and PAM is NNGRRT | | | |
|---|---|---|---|---|
| S. aureus | 78B | | | |
| 2nd Tier | | | Target Site | |
| gRNA Name | DNA Strand | Targeting Domain | Length | Seq ID |
| CDK1-45 | − | AAACUCACCGCGCUAAAGGGCC | 22 | 2230 |
| CDK1-46 | − | AAAGCAGGAGGGCGGGCGCCAA | 22 | 2231 |
| CDK1-47 | + | AAGUCUACGGGCUACCCGAUUG | 22 | 2232 |
| CDK1-48 | + | AGCCGGGUACAGUGGCUGGGGU | 22 | 2233 |
| CDK1-49 | + | AUAAUAAGCCGGGUACAGUGGC | 22 | 2234 |
| CDK1-50 | − | CAGCUACGCUGGGCAGGCCUUC | 22 | 2235 |
| CDK1-51 | − | UAAAGGGCCCCGGAUUCACCAA | 22 | 2236 |

### III. Cas9 Molecules

[0829] Cas9 molecules of a variety of species can be used in the methods and compositions described herein. While the S. pyogenes, S. aureus, and S. thermophilus Cas9 molecules are the subject of much of the disclosure herein, Cas9 molecules, derived from, or based on the Cas9 proteins of other species listed herein can be used as well. In other words, while the much of the description herein uses S. pyogenes and S. thermophilus Cas9 molecules, Cas9 molecules from the other species can replace them, e.g., Staphylococcus aureus and Neisseria meningitidis Cas9 molecules. Additional Cas9 species include: Acidovorax avenae, Actinobacillus pleuropneumoniae, Actinobacillus succinogenes, Actinobacillus suis, Actinomyces sp., cycliphilus denitrificans, Aminomonas paucivorans, Bacillus cereus, Bacillus smithii, Bacillus thuringiensis, Bacteroides sp., Blastopirellula marina, Bradyrhizobium sp., Brevibacillus laterosporus, Campylobacter coli, Campylobacter jejuni, Campylobacter lari, Candidatus Puniceispirillum, Clostridium cellulolyticum, Clostridium perfringens, Corynebacterium accolens, Corynebacterium diphtheria, Corynebacterium matruchotii, Dinoroseobacter shibae, Eubacterium dolichum, gamma proteobacterium, Gluconacetobacter diazotrophicus, Haemophilus parainfluenzae, Haemophilus sputorum, Helicobacter canadensis, Helicobacter cinaedi, Helicobacter mustelae, Ilyobacter polytropus, Kingella kingae, Lactobacillus crispatus, Listeria ivanovii, Listeria monocytogenes, Listeriaceae bacterium, Methylocystis sp., Methylosinus trichosporium, Mobiluncus mulieris, Neisseria bacilliformis, Neisseria cinerea, Neisseria flavescens, Neisseria lactamica, Neisseria sp., Neisseria wadsworthii, Nitrosomonas sp., Parvibaculum lavamentivorans, Pasteurella multocida, Phascolarctobacterium succinatutens, Ralstonia syzygii, Rhodopseudomonas palustris, Rhodovulum sp., Simonsiella muelleri, Sphingomonas sp., Sporolactobacillus vineae, Staphylococcus lugdunensis, Streptococcus sp., Subdoligranulum sp., Tistrella mobilis, Treponema sp., or Verminephrobacter eiseniae.

[0830] A Cas9 molecule, or Cas9 polypeptide, as the term is used herein, refers to a molecule or a polypeptide that can interact with a guide RNA (gRNA) molecule) and, in concert with the gRNA molecule, localizes to a site which comprises a target domain, and in some embodiments, a PAM sequence. Cas9 molecule and Cas9 polypeptide, as those terms are used herein, refer to naturally occurring Cas9 molecules and to engineered, altered, or modified Cas9 molecules or Cas9 polypeptides that differ, e.g., by at least one amino acid residue, from a reference sequence, e.g., the most similar naturally occurring Cas9 molecule or a sequence of Table III.1.

[0831] Cas9 Domains

[0832] Crystal structures have been determined for two different naturally occurring bacterial Cas9 molecules (Jinek et al., SCIENCE, 343(6176): 1247997, 2014) and for S. pyogenes Cas9 with a guide RNA (e.g., a synthetic fusion of crRNA and tracrRNA) (Nishimasu et al., CELL, 156:935-949, 2014; and Anders et al., NATURE, 2014, doi: 10.1038/nature13579).

[0833] A naturally occurring Cas9 molecule comprises two lobes: a recognition (REC) lobe and a nuclease (NUC) lobe; each of which further comprise domains described herein. The REC lobe comprises the arginine-rich bridge helix (BH), the REC1 domain, and the REC2 domain. The REC lobe does not share structural similarity with other known proteins, indicating that it is a Cas9-specific functional domain. The BH domain is a long a helix and arginine rich region and comprises amino acids 60-93 of the sequence of S. pyogenes Cas9. The REC1 domain is important for recognition of the repeat:anti-repeat duplex, e.g., of a gRNA or a tracrRNA, and is therefore critical for Cas9 activity by recognizing the target sequence. The REC1 domain comprises two REC1 motifs at amino acids 94 to 179 and 308 to 717 of the sequence of S. pyogenes Cas9. These two REC1 domains, though separated by the REC2 domain in the linear primary structure, assemble in the tertiary structure to form the REC1 domain. The REC2 domain, or parts thereof, may also play a role in the recognition of the repeat:anti-repeat duplex. The REC2 domain comprises amino acids 180-307 of the sequence of S. pyogenes Cas9.

[0834] The NUC lobe comprises the RuvC domain, the HNH domain, and the PAM-interacting (PI) domain. The RuvC domain shares structural similarity to retroviral integrase superfamily members and cleaves a single strand, e.g., the non-complementary strand of the target nucleic acid molecule. The RuvC domain is assembled from the three split RuvC motifs (RuvC I, RuvCII, and RuvCIII, which are often commonly referred to in the art as RuvCI domain, or N-terminal RuvC domain, RuvCII domain, and RuvCIII domain) at amino acids 1-59, 718-769, and 909-1098, respectively, of the sequence of S. pyogenes Cas9. Similar to the REC1 domain, the three RuvC motifs are linearly separated by other domains in the primary structure, however in the tertiary structure, the three RuvC motifs assemble and form the RuvC domain. The HNH domain shares structural similarity with HNH endonucleases, and cleaves a single strand, e.g., the complementary strand of the target nucleic acid molecule. The HNH domain lies between the RuvC II-III motifs and comprises amino acids 775-908 of the sequence of S. pyogenes Cas9. The PI domain interacts with the PAM of the target nucleic acid molecule, and comprises amino acids 1099-1368 of the sequence of S. pyogenes Cas9.

[0835] RuvC-Like Domain and HNH-Like Domain

[0836] In an embodiment, a Cas9 molecule or Cas9 polypeptide comprises an HNH-like domain and a RuvC-like domain. In an embodiment, cleavage activity is dependent on a RuvC-like domain and an HNH-like domain. A Cas9 molecule or Cas9 polypeptide, e.g., an eaCas9 molecule or eaCas9 polypeptide, can comprise one or more of the following domains: a RuvC-like domain and an HNH-like domain. In an embodiment, a Cas9 molecule or Cas9 polypeptide is an eaCas9 molecule or eaCas9 polypeptide and the eaCas9 molecule or eaCas9 polypeptide comprises a RuvC-like domain, e.g., a RuvC-like domain described below, and/or an HNH-like domain, e.g., an HNH-like domain described below.

[0837] RuvC-Like Domains

[0838] In an embodiment, a RuvC-like domain cleaves, a single strand, e.g., the non-complementary strand of the target nucleic acid molecule. The Cas9 molecule or Cas9 polypeptide can include more than one RuvC-like domain (e.g., one, two, three or more RuvC-like domains). In an embodiment, a RuvC-like domain is at least 5, 6, 7, 8 amino acids in length but not more than 20, 19, 18, 17, 16 or 15 amino acids in length. In an embodiment, the Cas9 molecule or Cas9 polypeptide comprises an N-terminal RuvC-like domain of about 10 to 20 amino acids, e.g., about 15 amino acids in length.

[0839] N-Terminal RuvC-Like Domains

[0840] Some naturally occurring Cas9 molecules comprise more than one RuvC-like domain with cleavage being dependent on the N-terminal RuvC-like domain. Accordingly, Cas9 molecules or Cas9 polypeptide can comprise an N-terminal RuvC-like domain. Exemplary N-terminal RuvC-like domains are described below.

[0841] In an embodiment, an eaCas9 molecule or eaCas9 polypeptide comprises an N-terminal RuvC-like domain comprising an amino acid sequence of formula I:
[0842] D-X1-G-X2-X3-X4-X5-G-X6-X7-X8-X9, wherein,
[0843] X1 is selected from I, V, M, L and T (e.g., selected from I, V, and L);
[0844] X2 is selected from T, I, V, S, N, Y, E and L (e.g., selected from T, V, and I);
[0845] X3 is selected from N, S, G, A, D, T, R, M and F (e.g., A or N);
[0846] X4 is selected from S, Y, N and F (e.g., S);
[0847] X5 is selected from V, I, L, C, T and F (e.g., selected from V, I and L);
[0848] X6 is selected from W, F, V, Y, S and L (e.g., W);
[0849] X7 is selected from A, S, C, V and G (e.g., selected from A and S);
[0850] X8 is selected from V, I, L, A, M and H (e.g., selected from V, I, M and L); and
[0851] X9 is selected from any amino acid or is absent (e.g., selected from T, V, I, L, A, F, S, A, Y, M and R, or, e.g., selected from T, V, I, L and A).

[0852] In an embodiment, the N-terminal RuvC-like domain differs from a sequence of SEQ ID NO: 108, by as many as 1 but no more than 2, 3, 4, or 5 residues.

[0853] In embodiment, the N-terminal RuvC-like domain is cleavage competent.

[0854] In embodiment, the N-terminal RuvC-like domain is cleavage incompetent.

[0855] In an embodiment, a eaCas9 molecule or eaCas9 polypeptide comprises an N-terminal RuvC-like domain comprising an amino acid sequence of formula II:

(SEQ ID NO: 109),
D-X1-G-X2-X3-S-X5-G-X6-X7-X8-X9,

[0856] wherein
[0857] X1 is selected from I, V, M, L and T (e.g., selected from I, V, and L);
[0858] X2 is selected from T, I, V, S, N, Y, E and L (e.g., selected from T, V, and I);
[0859] X3 is selected from N, S, G, A, D, T, R, M and F (e.g., A or N);
[0860] X5 is selected from V, I, L, C, T and F (e.g., selected from V, I and L);
[0861] X6 is selected from W, F, V, Y, S and L (e.g., W);
[0862] X7 is selected from A, S, C, V and G (e.g., selected from A and S);
[0863] X8 is selected from V, I, L, A, M and H (e.g., selected from V, I, M and L); and
[0864] X9 is selected from any amino acid or is absent (e.g., selected from T, V, I, L, A, F, S, A, Y, M and R or selected from e.g., T, V, I, L and A).

[0865] In an embodiment, the N-terminal RuvC-like domain differs from a sequence of SEQ ID NO: 109 by as many as 1 but no more than 2, 3, 4, or 5 residues.

[0866] In an embodiment, the N-terminal RuvC-like domain comprises an amino acid sequence of formula III:

(SEQ ID NO: 110)
D-I-G-X2-X3-S-V-G-W-A-X8-X9,

[0867] wherein
[0868] X2 is selected from T, I, V, S, N, Y, E and L (e.g., selected from T, V, and I);
[0869] X3 is selected from N, S, G, A, D, T, R, M and F (e.g., A or N);
[0870] X8 is selected from V, I, L, A, M and H (e.g., selected from V, I, M and L); and
[0871] X9 is selected from any amino acid or is absent (e.g., selected from T, V, I, L, A, F, S, A, Y, M and R or selected from e.g., T, V, I, L and A).

[0872] In an embodiment, the N-terminal RuvC-like domain differs from a sequence of SEQ ID NO:110 by as many as 1 but no more than, 2, 3, 4, or 5 residues.

[0873] In an embodiment, the N-terminal RuvC-like domain comprises an amino acid sequence of formula III:

(SEQ ID NO: 111)
D-I-G-T-N-S-V-G-W-A-V-X,

[0874] wherein
[0875] X is a non-polar alkyl amino acid or a hydroxyl amino acid, e.g., X is selected from V, I, L and T.

[0876] In an embodiment, the N-terminal RuvC-like domain differs from a sequence of SEQ ID NO: 111 by as many as 1 but no more than, 2, 3, 4, or 5 residues.

[0877] In an embodiment, the N-terminal RuvC-like domain differs from a sequence of an N-terminal RuvC like domain disclosed herein, as many as 1 but no more than 2, 3, 4, or 5 residues.

[0878] Additional RuvC-Like Domains

[0879] In addition to the N-terminal RuvC-like domain, the Cas9 molecule or Cas9 polypeptide, e.g., an eaCas9 molecule or eaCas9 polypeptide, can comprise one or more additional RuvC-like domains. In an embodiment, the Cas9 molecule or Cas9 polypeptide can comprise two additional RuvC-like domains. Preferably, the additional RuvC-like domain is at least 5 amino acids in length and, e.g., less than 15 amino acids in length, e.g., 5 to 10 amino acids in length, e.g., 8 amino acids in length.

[0880] An additional RuvC-like domain can comprise an amino acid sequence:

(SEQ ID NO: 112)
I-X1-X2-E-X3-A-R-E,

wherein
[0881] X1 is V or H,
[0882] X2 is I, L or V (e.g., I or V); and
[0883] X3 is M or T.

[0884] In an embodiment, the additional RuvC-like domain comprises the amino acid sequence:

(SEQ ID NO: 113)
I-V-X2-E-M-A-R-E,

wherein
[0885] X2 is I, L or V (e.g., I or V).

[0886] An additional RuvC-like domain can comprise an amino acid sequence:

(SEQ ID NO: 114)
H-H-A-X1-D-A-X2-X3,

wherein
[0887] X1 is H or L;
[0888] X2 is R or V; and
[0889] X3 is E or V.

[0890] In an embodiment, the additional RuvC-like domain comprises the amino acid sequence:

(SEQ ID NO: 115)
H-H-A-H-D-A-Y-L.

[0891] In an embodiment, the additional RuvC-like domain differs from a sequence of SEQ ID NOS 112, 113, 114, and 115 by as many as 1 but no more than 2, 3, 4, or 5 residues.

[0892] In some embodiments, the sequence flanking the N-terminal RuvC-like domain is a sequences of formula V:

(SEQ ID NO: 116
K-X1′-Y-X2′-X3′-X4′-Z-T-D-X9′-Y,

and 2290, respectively, in order of appearance).

[0893] wherein
[0894] X1′ is selected from K and P,
[0895] X2′ is selected from V, L, I, and F (e.g., V, I and L);
[0896] X3′ is selected from G, A and S (e.g., G),
[0897] X4′ is selected from L, I, V and F (e.g., L);
[0898] X9′ is selected from D, E, N and Q; and
[0899] Z is an N-terminal RuvC-like domain, e.g., as described above.

[0900] HNH-Like Domains

[0901] In an embodiment, an HNH-like domain cleaves a single stranded complementary domain, e.g., a complementary strand of a double stranded nucleic acid molecule. In an embodiment, an HNH-like domain is at least 15, 20, 25 amino acids in length but not more than 40, 35 or 30 amino acids in length, e.g., 20 to 35 amino acids in length, e.g., 25 to 30 amino acids in length. Exemplary HNH-like domains are described below.

[0902] In an embodiment, an eaCas9 molecule or eaCas9 polypeptide comprises an HNH-like domain having an amino acid sequence of formula VI:

(SEQ ID NO: 117)
X1-X2-X3-H-X4-X5-P-X6-X7-X8-X9-X10-X11-X12-X13-
X14-X15-N-X16-X17-X18-X19-X20-X21-X22-X23-N,

wherein
[0903] X1 is selected from D, E, Q and N (e.g., D and E);
[0904] X2 is selected from L, I, R, Q, V, M and K;
[0905] X3 is selected from D and E;
[0906] X4 is selected from I, V, T, A and L (e.g., A, I and V);
[0907] X5 is selected from V, Y, I, L, F and W (e.g., V, I and L);
[0908] X6 is selected from Q, H, R, K, Y, I, L, F and W;
[0909] X7 is selected from S, A, D, T and K (e.g., S and A);
[0910] X8 is selected from F, L, V, K, Y, M, I, R, A, E, D and Q (e.g., F);
[0911] X9 is selected from L, R, T, I, V, S, C, Y, K, F and G;
[0912] X10 is selected from K, Q, Y, T, F, L, W, M, A, E, G, and S;
[0913] X11 is selected from D, S, N, R, L and T (e.g., D);
[0914] X12 is selected from D, N and S;
[0915] X13 is selected from S, A, T, G and R (e.g., S);
[0916] X14 is selected from I, L, F, S, R, Y, Q, W, D, K and H (e.g., I, L and F);
[0917] X15 is selected from D, S, I, N, E, A, H, F, L, Q, M, G, Y and V;
[0918] X16 is selected from K, L, R, M, T and F (e.g., L, R and K);
[0919] X17 is selected from V, L, I, A and T;
[0920] X18 is selected from L, I, V and A (e.g., L and I);
[0921] X19 is selected from T, V, C, E, S and A (e.g., T and V);
[0922] X20 is selected from R, F, T, W, E, L, N, C, K, V, S, Q, I, Y, H and A;
[0923] X21 is selected from S, P, R, K, N, A, H, Q, G and L;
[0924] X22 is selected from D, G, T, N, S, K, A, I, E, L, Q, R and Y; and
[0925] X23 is selected from K, V, A, E, Y, I, C, L, S, T, G, K, M, D and F.

[0926] In an embodiment, a HNH-like domain differs from a sequence of SEQ ID NO: 117 by at least one but no more than, 2, 3, 4, or 5 residues.

[0927] In an embodiment, the HNH-like domain is cleavage competent.

[0928] In an embodiment, the HNH-like domain is cleavage incompetent.

[0929] In an embodiment, an eaCas9 molecule or eaCas9 polypeptide comprises an HNH-like domain comprising an amino acid sequence of formula VII:

(SEQ ID NO: 118)
X1-X2-X3-H-X4-X5-P-X6-S-X8-X9-X10-D-D-S-X14-X15-
N-K-V-L-X19-X20-X21-X22-X23-N,

[0930] wherein
[0931] X1 is selected from D and E;
[0932] X2 is selected from L, I, R, Q, V, M and K;
[0933] X3 is selected from D and E;
[0934] X4 is selected from I, V, T, A and L (e.g., A, I and V);
[0935] X5 is selected from V, Y, I, L, F and W (e.g., V, I and L);
[0936] X6 is selected from Q, H, R, K, Y, I, L, F and W;
[0937] X8 is selected from F, L, V, K, Y, M, I, R, A, E, D and Q (e.g., F);
[0938] X9 is selected from L, R, T, I, V, S, C, Y, K, F and G;
[0939] X10 is selected from K, Q, Y, T, F, L, W, M, A, E, G, and S;
[0940] X14 is selected from I, L, F, S, R, Y, Q, W, D, K and H (e.g., I, L and F);
[0941] X15 is selected from D, S, I, N, E, A, H, F, L, Q, M, G, Y and V;
[0942] X19 is selected from T, V, C, E, S and A (e.g., T and V);
[0943] X20 is selected from R, F, T, W, E, L, N, C, K, V, S, Q, I, Y, H and A;
[0944] X21 is selected from S, P, R, K, N, A, H, Q, G and L;
[0945] X22 is selected from D, G, T, N, S, K, A, I, E, L, Q, R and Y; and
[0946] X23 is selected from K, V, A, E, Y, I, C, L, S, T, G, K, M, D and F.

[0947] In an embodiment, the HNH-like domain differs from a sequence of SEQ ID NO: 118 by 1, 2, 3, 4, or 5 residues.

[0948] In an embodiment, an eaCas9 molecule or eaCas9 polypeptide comprises an HNH-like domain comprising an amino acid sequence of formula VII:

(SEQ ID NO: 119)
X1-V-X3-H-I-V-P-X6-S-X8-X9-X10-D-D-S-X14-X15-N-K-
V-L-T-X20-X21-X22-X23-N,

wherein
[0949] X1 is selected from D and E;
[0950] X3 is selected from D and E;
[0951] X6 is selected from Q, H, R, K, Y, I, L and W;
[0952] X8 is selected from F, L, V, K, Y, M, I, R, A, E, D and Q (e.g., F);
[0953] X9 is selected from L, R, T, I, V, S, C, Y, K, F and G;
[0954] X10 is selected from K, Q, Y, T, F, L, W, M, A, E, G, and S;
[0955] X14 is selected from I, L, F, S, R, Y, Q, W, D, K and H (e.g., I, L and F);
[0956] X15 is selected from D, S, I, N, E, A, H, F, L, Q, M, G, Y and V;
[0957] X20 is selected from R, F, T, W, E, L, N, C, K, V, S, Q, I, Y, H and A;
[0958] X21 is selected from S, P, R, K, N, A, H, Q, G and L;
[0959] X22 is selected from D, G, T, N, S, K, A, I, E, L, Q, R and Y; and
[0960] X23 is selected from K, V, A, E, Y, I, C, L, S, T, G, K, M, D and F.

[0961] In an embodiment, the HNH-like domain differs from a sequence of SEQ ID NO: 119 by 1, 2, 3, 4, or 5 residues.

[0962] In an embodiment, an eaCas9 molecule or eaCas9 polypeptide comprises an HNH-like domain having an amino acid sequence of formula VIII:

(SEQ ID NO: 120)
D-X2-D-H-I-X5-P-Q-X7-F-X9-X10-D-X12-S-I-D-N-X16-V-
L-X19-X20-S-X22-X23-N,

[0963] wherein
[0964] X2 is selected from I and V;
[0965] X5 is selected from I and V;
[0966] X7 is selected from A and S;
[0967] X9 is selected from I and L;
[0968] X10 is selected from K and T;
[0969] X12 is selected from D and N;
[0970] X16 is selected from R, K and L; X19 is selected from T and V;
[0971] X20 is selected from S and R;
[0972] X22 is selected from K, D and A; and
[0973] X23 is selected from E, K, G and N (e.g., the eaCas9 molecule or eaCas9 polypeptide can comprise an HNH-like domain as described herein).

[0974] In an embodiment, the HNH-like domain differs from a sequence of SEQ ID NO: 120 by as many as 1 but no more than 2, 3, 4, or 5 residues.

[0975] In an embodiment, an eaCas9 molecule or eaCas9 polypeptide comprises the amino acid sequence of formula IX:

(SEQ ID NO: 121
L-Y-Y-L-Q-N-G-X1′-D-M-Y-X2′-X3′-X4′-X5′-L-D-I-X6′-
X7′-L-S-X8′-Y-Z-N-R-X9′-K-X10′-D-X11′-V-P

and 2291, respectively, in order of appearance),

[0976] wherein
[0977] X1′ is selected from K and R;
[0978] X2′ is selected from V and T;
[0979] X3′ is selected from G and D;
[0980] X4′ is selected from E, Q and D;
[0981] X5′ is selected from E and D;
[0982] X6′ is selected from D, N and H;
[0983] X7′ is selected from Y, R and N;
[0984] X8′ is selected from Q, D and N; X9′ is selected from G and E;
[0985] X10′ is selected from S and G;
[0986] X11′ is selected from D and N; and
[0987] Z is an HNH-like domain, e.g., as described above.

[0988] In an embodiment, the eaCas9 molecule or eaCas9 polypeptide comprises an amino acid sequence that differs from a sequence of SEQ ID NO: 121 by as many as 1 but no more than 2, 3, 4, or 5 residues.

[0989] In an embodiment, the HNH-like domain differs from a sequence of an HNH-like domain disclosed herein, by as many as 1 but no more than 2, 3, 4, or 5 residues.

[0990] In an embodiment, the HNH-like domain differs from a sequence of an HNH-like domain disclosed herein, by as many as 1 but no more than 2, 3, 4, or 5 residues.

[0991] Cas9 Activities

[0992] Nuclease and Helicase Activities

[0993] In an embodiment, the Cas9 molecule or Cas9 polypeptide is capable of cleaving a target nucleic acid molecule. Typically wild type Cas9 molecules cleave both strands of a target nucleic acid molecule. Cas9 molecules and Cas9 polypeptides can be engineered to alter nuclease cleavage (or other properties), e.g., to provide a Cas9 molecule or Cas9 polypeptide which is a nickase, or which lacks the ability to cleave target nucleic acid. A Cas9 molecule or Cas9 polypeptide that is capable of cleaving a target nucleic acid molecule is referred to herein as an eaCas9 (an enzymatically active Cas9) molecule or eaCas9 polypeptide.

[0994] In an embodiment, an eaCas9 molecule or eaCas9 polypeptide comprises one or more of the following enzymatic activities:
[0995] a nickase activity, i.e., the ability to cleave a single strand, e.g., the non-complementary strand or the complementary strand, of a nucleic acid molecule;
[0996] a double stranded nuclease activity, i.e., the ability to cleave both strands of a double stranded nucleic acid and create a double strand break, which in an embodiment is the presence of two nickase activities;
[0997] an endonuclease activity;
[0998] an exonuclease activity; and
[0999] a helicase activity, i.e., the ability to unwind the helical structure of a double stranded nucleic acid.

[1000] In an embodiment, an enzymatically active or an eaCas9 molecule or eaCas9 polypeptide cleaves both DNA strands and results in a double strand break. In an embodiment, an eaCas9 molecule or eaCas9 polypeptide cleaves only one strand, e.g., the strand to which the gRNA hybridizes to, or the strand complementary to the strand the gRNA hybridizes with. In an embodiment, an eaCas9 molecule or eaCas9 polypeptide comprises cleavage activity associated with an HNH domain. In an embodiment, an eaCas9 molecule or eaCas9 polypeptide comprises cleavage activity associated with a RuvC domain. In an embodiment, an eaCas9 molecule or eaCas9 polypeptide comprises cleavage activity associated with an HNH domain and cleavage activity associated with a RuvC domain. In an embodiment, an eaCas9 molecule or eaCas9 polypeptide comprises an active, or cleavage competent, HNH domain and an inactive, or cleavage incompetent, RuvC domain. In an embodiment, an eaCas9 molecule or eaCas9 polypeptide comprises an inactive, or cleavage incompetent, HNH domain and an active, or cleavage competent, RuvC domain.

[1001] Some Cas9 molecules or Cas9 polypeptides have the ability to interact with a gRNA molecule, and in conjunction with the gRNA molecule, localize to a target sequence on a target nucleic acid (the target domain), but are incapable of cleaving the target nucleic acid, or incapable of cleaving at efficient rates. Cas9 molecules having no, or no substantial, cleavage activity are referred to herein as an eiCas9 molecule or eiCas9 polypeptide. For example, an eiCas9 molecule or eiCas9 polypeptide can lack cleavage activity or have substantially less, e.g., less than 20, 10, 5, 1 or 0.1% of the cleavage activity of a reference Cas9 molecule or eiCas9 polypeptide, as measured by an assay described herein.

[1002] Targeting and PAMs

[1003] A Cas9 molecule or Cas9 polypeptide, is a polypeptide that can interact with a guide RNA (gRNA) molecule and, in concert with the gRNA molecule, localizes to a site which comprises a target domain, and in an embodiment, a PAM sequence.

[1004] In an embodiment, the ability of an eaCas9 molecule or eaCas9 polypeptide to interact with and cleave a target nucleic acid is PAM sequence dependent. A PAM sequence is a sequence in the target nucleic acid. In an embodiment, cleavage of the target nucleic acid occurs upstream from the PAM sequence. EaCas9 molecules from different bacterial species can recognize different sequence motifs (e.g., PAM sequences). In an embodiment, an eaCas9 molecule of S. pyogenes recognizes the sequence motif NGG and directs cleavage of a target nucleic acid sequence 1 to 10, e.g., 3 to 5, base pairs upstream from that sequence. See, e.g., Mali et al., SCIENCE (2013) 339(6121): 823-826. In an embodiment, an eaCas9 molecule of S. thermophilus recognizes the sequence motif NGGNG and/or NNAGAAW (W=A or T) and directs cleavage of a target nucleic acid sequence 1 to 10, e.g., 3 to 5, base pairs upstream from these sequences. See, e.g., Horvath et al., SCIENCE (2010); 327(5962):167-170, and Deveau et al., J. BACTERIOL. 2008; 190(4): 1390-1400. In an embodiment, an eaCas9 molecule of S. mutans recognizes the sequence motif NGG and/or NAAR (R=A or G) and directs cleavage of a target nucleic acid sequence 1 to 10, e.g., 3 to 5 base pairs, upstream from this sequence. See, e.g., Deveau et al., J BACTERIOL 2008; 190(4): 1390-1400. In an embodiment, an eaCas9 molecule of S. aureus recognizes the sequence motif NNGRR (R=A or G) and directs cleavage of a target nucleic acid sequence 1 to 10, e.g., 3 to 5, base pairs upstream from that sequence. In an embodiment, an eaCas9 molecule of S. aureus recognizes the sequence motif NNGRRN (R=A or G) and directs cleavage of a target nucleic acid sequence 1 to 10, e.g., 3 to 5, base pairs upstream from that sequence. In an embodiment, an eaCas9 molecule of S. aureus recognizes the sequence motif NNGRRT (R=A or G) and directs cleavage of a target nucleic acid sequence 1 to 10, e.g., 3 to 5, base pairs upstream from that sequence. In an embodiment, an eaCas9 molecule of S. aureus recognizes the sequence motif NNGRRV (R=A or G) and directs cleavage of a target nucleic acid sequence 1 to 10, e.g., 3 to 5, base pairs upstream from that sequence. In an embodiment, an eaCas9 molecule of N. meningitidis recognizes the sequence motif NNNNGATT or NNNGCTT (R=A or G) and directs cleavage of a target nucleic acid sequence 1 to 10, e.g., 3 to 5, base pairs upstream from that sequence. See, e.g., Hou et al. (2013) PROC. NAT′L. ACAD. SCI. USA 110(39):15644-15649. The ability of a Cas9 molecule to recognize a PAM sequence can be determined, e.g., using a transformation assay described in Jinek et al. (2012) SCIENCE 337:816. In the aforementioned embodiments, N can be any nucleotide residue, e.g., any of A, G, C or T. In one embodiment, the PAM sequence is facing outward.

[1005] As is discussed herein, Cas9 molecules can be engineered to alter the PAM specificity of the Cas9 molecule.

[1006] Exemplary naturally occurring Cas9 molecules are described in Chylinski et al. (2013) RNA BIOLOGY 10:5, 727-737. Such Cas9 molecules include Cas9 molecules of a cluster 1 bacterial family, cluster 2 bacterial family, cluster 3 bacterial family, cluster 4 bacterial family, cluster 5 bacterial family, cluster 6 bacterial family, a cluster 7 bacterial family, a cluster 8 bacterial family, a cluster 9 bacterial family, a cluster 10 bacterial family, a cluster 11 bacterial family, a cluster 12 bacterial family, a cluster 13 bacterial family, a cluster 14 bacterial family, a cluster 15 bacterial family, a cluster 16 bacterial family, a cluster 17 bacterial family, a cluster 18 bacterial family, a cluster 19 bacterial family, a cluster 20 bacterial family, a cluster 21 bacterial family, a cluster 22 bacterial family, a cluster 23 bacterial family, a cluster 24 bacterial family, a cluster 25 bacterial family, a cluster 26 bacterial family, a cluster 27 bacterial family, a cluster 28 bacterial family, a cluster 29 bacterial family, a cluster 30 bacterial family, a cluster 31 bacterial family, a cluster 32 bacterial family, a cluster 33 bacterial family, a cluster 34 bacterial family, a cluster 35 bacterial family, a cluster 36 bacterial family, a cluster 37 bacterial family, a cluster 38 bacterial family, a cluster 39 bacterial family, a cluster 40 bacterial family, a cluster 41 bacterial family, a cluster 42 bacterial family, a cluster 43 bacterial family, a cluster 44 bacterial family, a cluster 45 bacterial family, a cluster 46 bacterial family, a cluster 47 bacterial family, a cluster 48 bacterial family, a cluster 49 bacterial family, a cluster 50 bacterial family, a cluster 51 bacterial family, a cluster 52 bacterial family, a cluster 53 bacterial family, a cluster 54 bacterial family, a cluster 55 bacterial family, a cluster 56 bacterial family, a cluster 57 bacterial family, a cluster 58 bacterial family, a cluster 59 bacterial family, a cluster 60 bacterial family, a cluster 61 bacterial family, a cluster 62 bacterial family, a cluster 63 bacterial family, a cluster 64 bacterial family, a cluster 65 bacterial family, a cluster 66 bacterial family, a cluster 67 bacterial family, a cluster 68 bacterial family, a cluster 69 bacterial family, a cluster 70 bacterial family, a cluster 71 bacterial family, a cluster 72 bacterial family, a cluster 73 bacterial family, a cluster 74 bacterial family, a cluster 75 bacterial family, a cluster 76 bacterial family, a cluster 77 bacterial family, or a cluster 78 bacterial family.

[1007] Exemplary naturally occurring Cas9 molecules include a Cas9 molecule of a cluster 1 bacterial family. Examples include a Cas9 molecule of: S. pyogenes (e.g., strain SF370, MGAS10270, MGAS10750, MGAS2096, MGAS315, MGAS5005, MGAS6180, MGAS9429, NZ131 and SSI-1), S. thermophilus (e.g., strain LMD-9), S. pseudoporcinus (e.g., strain SPIN 20026), S. mutans (e.g., strain UA159, NN2025), S. macacae (e.g., strain NCTC11558), S. gallolyticus (e.g., strain UCN34, ATCC BAA-2069), S. equines (e.g., strain ATCC 9812, MGCS 124), S. dysdalactiae (e.g., strain GGS 124), S. bovis (e.g., strain ATCC 700338), S. anginosus (e.g., strain F0211), S. agalactiae (e.g., strain NEM316, A909), Listeria monocytogenes (e.g., strain F6854), Listeria innocua (L. innocua, e.g., strain Clip11262), Enterococcus italicus (e.g., strain DSM 15952), or Enterococcus faecium (e.g., strain 1,231,408). Additional exemplary Cas9 molecules are a Cas9 molecule of Neisseria meningitidis (Hou et al., PNAS Early Edition 2013, 1-6 and a S. aureus Cas9 molecule. In an embodiment, a Cas9 molecule or Cas9 polypeptide, e.g., an eaCas9 molecule or eaCas9 polypeptide, comprises an amino acid sequence:
[1008] having 60%, 65%, 70%, 75%, 80%, 81%, 82%, 83%, 84%, 85%, 86%, 87%, 88%, 89%, 90%, 91%, 92%, 93%, 94%, 95%, 96%, 97%, 98% or 99% homology with;
[1009] differs at no more than, 2, 5, 10, 15, 20, 30, or 40% of the amino acid residues when compared with;
[1010] differs by at least 1, 2, 3, 4, 5, 6, 7, 8, 9, 10, 11, 12, 13, 14, 15, 16, 17, 18, 19, 20 amino acids, but by no more than 100, 80, 70, 60, 50, 40 or 30 amino acids from; or
[1011] is identical to any Cas9 molecule sequence described herein, or a naturally occurring Cas9 molecule sequence, e.g., a Cas9 molecule from a species listed herein or described in Chylinski et al. (2013) RNA BIOLOGY 10:5, 727-737; Hou et al., PNAS Early Edition 2013, 1-6. In an embodiment, the Cas9 molecule or Cas9 polypeptide comprises one or more of the following activities: a nickase activity; a double stranded cleavage activity (e.g., an endonuclease and/or exonuclease activity); a helicase activity; or the ability, together with a gRNA molecule, to localize to a target nucleic acid.

[1012] Engineered or Altered Cas9 Molecules and Cas9 Polypeptides

[1013] Cas9 molecules and Cas9 polypeptides described herein, e.g., naturally occurring Cas9 molecules, can possess any of a number of properties, including: nuclease activity (e.g., endonuclease and/or exonuclease activity); helicase activity; the ability to associate functionally with a gRNA molecule; and the ability to target (or localize to) a site on a nucleic acid (e.g., PAM recognition and specificity). In an embodiment, a Cas9 molecule or Cas9 polypeptide can include all or a subset of these properties. In a typical embodiment, a Cas9 molecule or Cas9 polypeptide has the ability to interact with a gRNA molecule and, in concert with the gRNA molecule, localize to a site in a nucleic acid. Other activities, e.g., PAM specificity, cleavage activity, or helicase activity can vary more widely in Cas9 molecules and Cas9 polypeptides.

[1014] Cas9 molecules include engineered Cas9 molecules and engineered Cas9 polypeptides (engineered, as used in this context, means merely that the Cas9 molecule or Cas9 polypeptide differs from a reference sequences, and implies no process or origin limitation). An engineered Cas9 molecule or Cas9 polypeptide can comprise altered enzymatic properties, e.g., altered nuclease activity (as compared with a naturally occurring or other reference Cas9 molecule) or altered helicase activity. As discussed herein, an engineered Cas9 molecule or Cas9 polypeptide can have nickase activity (as opposed to double strand nuclease activity). In an embodiment an engineered Cas9 molecule or Cas9 polypeptide can have an alteration that alters its size, e.g., a deletion of amino acid sequence that reduces its size, e.g., without significant effect on one or more, or any Cas9 activity. In an embodiment, an engineered Cas9 molecule or Cas9 polypeptide can comprise an alteration that affects PAM recognition. For example, an engineered Cas9 molecule can be altered to recognize a PAM sequence other than that recognized by the endogenous wild-type PI domain. In an embodiment a Cas9 molecule or Cas9 polypeptide can differ in sequence from a naturally occurring Cas9 molecule but not have significant alteration in one or more Cas9 activities.

[1015] Cas9 molecules or Cas9 polypeptides with desired properties can be made in a number of ways, e.g., by alteration of a parental, e.g., naturally occurring Cas9 molecule or Cas9 polypeptide, to provide an altered Cas9 molecule or Cas9 polypeptide having a desired property. For example, one or more mutations or differences relative to a parental Cas9 molecule, e.g., a naturally occurring or engineered Cas9 molecule, can be introduced. Such mutations and differences comprise: substitutions (e.g., conservative substitutions or substitutions of non-essential amino acids), insertions, or deletions. In an embodiment, a Cas9 molecule or Cas9 polypeptide can comprises one or more mutations or differences, e.g., at least 1, 2, 3, 4, 5, 10, 15, 20, 30, 40 or 50 mutations but less than 200, 100, or 80 mutations relative to a reference, e.g., a parental Cas9 molecule.

[1016] In an embodiment, a mutation or mutations do not have a substantial effect on a Cas9 activity, e.g. a Cas9 activity described herein. In an embodiment, a mutation or mutations have a substantial effect on a Cas9 activity, e.g. a Cas9 activity described herein.

[1017] Non-Cleaving and Modified-Cleavage Cas9 Molecules and Cas9 Polypeptides

[1018] In an embodiment, a Cas9 molecule or Cas9 polypeptide comprises a cleavage property that differs from naturally occurring Cas9 molecules, e.g., that differs from the naturally occurring Cas9 molecule having the closest homology. For example, a Cas9 molecule or Cas9 polypeptide can differ from a naturally occurring Cas9 molecule, e.g., a Cas9 molecule of S. pyogenes, as follows: its ability to modulate, e.g., decreased or increased, cleavage of a double stranded nucleic acid (endonuclease and/or exonuclease activity), e.g., as compared to a naturally occurring Cas9 molecule (e.g., a Cas9 molecule of S. pyogenes); its ability to modulate, e.g., decreased or increased, cleavage of a single strand of a nucleic acid, e.g., a non-complementary strand of a nucleic acid molecule or a complementary strand of a nucleic acid molecule (nickase activity), e.g., as compared to a naturally occurring Cas9 molecule (e.g., a Cas9 molecule of S. pyogenes); or the ability to cleave a nucleic acid molecule, e.g., a double stranded or single stranded nucleic acid molecule, can be eliminated.

[1019] Alterations in the Ability to Cleave One or Both Strands of a Target Nucleic Acid

[1020] In an embodiment, exemplary Cas9 activities comprise one or more of PAM specificity, cleavage activity, and helicase activity. A mutation(s) can be present, e.g., in: one or more RuvC domains, e.g., an N-terminal RuvC domain; an HNH domain; a region outside the RuvC domains and the HNH domain. In an embodiment, a mutation(s) is present in a RuvC domain. In an embodiment, a mutation(s) is present in an HNH domain. In an embodiment, mutations are present in both a RuvC domain and an HNH domain.

[1021] Exemplary mutations that may be made in the RuvC domain or HNH domain with reference to the S. pyogenes Cas9 sequence include: D10A, E762A, H840A, N854A, N863A and/or D986A. Exemplary mutations that may be made in the RuvC domain with reference to the S. aureus Cas9 sequence include: N580A.

[1022] In an embodiment, a Cas9 molecule is an eiCas9 molecule comprising one or more differences in a RuvC domain and/or in an HNH domain as compared to a reference Cas9 molecule, and the eiCas9 molecule does not cleave a nucleic acid, or cleaves with significantly less efficiency than does wild type, e.g., when compared with wild type in a cleavage assay, e.g., as described herein, cuts with less than 50, 25, 10, or 1% of a reference Cas9 molecule, as measured by an assay described herein.

[1023] Whether or not a particular sequence, e.g., a substitution, may affect one or more activity, such as targeting activity, cleavage activity, etc., can be evaluated or predicted, e.g., by evaluating whether the mutation is conservative. In an embodiment, a “non-essential” amino acid residue, as used in the context of a Cas9 molecule, is a residue that can be altered from the wild-type sequence of a Cas9 molecule, e.g., a naturally occurring Cas9 molecule, e.g., an eaCas9 molecule, without abolishing or more preferably, without substantially altering a Cas9 activity (e.g., cleavage activity), whereas changing an “essential” amino acid residue results in a substantial loss of activity (e.g., cleavage activity).

[1024] In an embodiment, a Cas9 molecule comprises a cleavage property that differs from naturally occurring Cas9 molecules, e.g., that differs from the naturally occurring Cas9 molecule having the closest homology. For example, a Cas9 molecule can differ from naturally occurring Cas9 molecules, e.g., a Cas9 molecule of S. aureus, S. pyogenes, or C. jejuni as follows: its ability to modulate, e.g., decreased or increased, cleavage of a double strand break (endonuclease and/or exonuclease activity), e.g., as compared to a naturally occurring Cas9 molecule (e.g., a Cas9 molecule of S. aureus, S. pyogenes, or C. jejuni); its ability to modulate, e.g., decreased or increased, cleavage of a single strand of a nucleic acid, e.g., a non-complimentary strand of a nucleic acid molecule or a complementary strand of a nucleic acid molecule (nickase activity), e.g., as compared to a naturally occurring Cas9 molecule (e.g., a Cas9 molecule of S. aureus, S. pyogenes, or C. jejuni); or the ability to cleave a nucleic acid molecule, e.g., a double stranded or single stranded nucleic acid molecule, can be eliminated.

[1025] In an embodiment, the altered Cas9 molecule is an eaCas9 molecule comprising one or more of the following activities: cleavage activity associated with a RuvC domain; cleavage activity associated with an HNH domain; cleavage activity associated with an HNH domain and cleavage activity associated with a RuvC domain.

[1026] In an embodiment, the altered Cas9 molecule is an eiCas9 molecule which does not cleave a nucleic acid molecule (either double stranded or single stranded nucleic acid molecules) or cleaves a nucleic acid molecule with significantly less efficiency, e.g., less than 20, 10, 5, 1 or 0.1% of the cleavage activity of a reference Cas9 molecule, e.g., as measured by an assay described herein. The reference Cas9 molecule can be a naturally occurring unmodified Cas9 molecule, e.g., a naturally occurring Cas9 molecule such as a Cas9 molecule of S. pyogenes, S. thermophilus, S. aureus, C. jejuni or N. meningitidis. In an embodiment, the reference Cas9 molecule is the naturally occurring Cas9 molecule having the closest sequence identity or homology. In an embodiment, the eiCas9 molecule lacks substantial cleavage activity associated with a RuvC domain and cleavage activity associated with an HNH domain.

[1027] In an embodiment, the altered Cas9 molecule or Cas9 polypeptide, e.g., an eaCas9 molecule or eaCas9 polypeptide, can be a fusion, e.g., of two of more different Cas9 molecules, e.g., of two or more naturally occurring Cas9 molecules of different species. For example, a fragment of a naturally occurring Cas9 molecule of one species can be fused to a fragment of a Cas9 molecule of a second species. As an example, a fragment of a Cas9 molecule of S. pyogenes comprising an N-terminal RuvC-like domain can be fused to a fragment of Cas9 molecule of a species other than S. pyogenes (e.g., S. thermophilus) comprising an HNH-like domain.

[1028] Cas9 Molecules with Altered PAM Recognition or No PAM Recognition

[1029] Naturally occurring Cas9 molecules can recognize specific PAM sequences, for example the PAM recognition sequences described above for, e.g., S. pyogenes, S. thermophilus, S. mutans, S. aureus and N. meningitidis.

[1030] In an embodiment, a Cas9 molecule or Cas9 polypeptide has the same PAM specificities as a naturally occurring Cas9 molecule. In an embodiment, a Cas9 molecule or Cas9 polypeptide has a PAM specificity not associated with a naturally occurring Cas9 molecule, or a PAM specificity not associated with the naturally occurring Cas9 molecule to which it has the closest sequence homology. For example, a naturally occurring Cas9 molecule can be altered, e.g., to alter PAM recognition, e.g., to alter the PAM sequence that the Cas9 molecule or Cas9 polypeptide recognizes to decrease off target sites and/or improve specificity; or eliminate a PAM recognition requirement. In an embodiment, a Cas9 molecule or Cas9 polypeptide can be altered, e.g., to increase length of PAM recognition sequence and/or improve Cas9 specificity to a high level of identity (e.g., 98%, 99% or 100% match between gRNA and a PAM sequence), e.g., to decrease off target sites and increase specificity. In an embodiment, the length of the PAM recognition sequence is at least 4, 5, 6, 7, 8, 9, 10 or 15 amino acids in length. Cas9 molecules or Cas9 polypeptides that recognize different PAM sequences and/or have reduced off-target activity can be generated using directed evolution. Exemplary methods and systems that can be used for directed evolution of Cas9 molecules are described, e.g., in Esvelt et al. (2011) NATURE 472(7344): 499-503. Candidate Cas9 molecules can be evaluated, e.g., by methods described in Section IV.

[1031] In one embodiment, the Cas9 molecule is a S. pyogenes Cas9 variant. In certain embodiments, the Cas9 variant is the EQR variant. In certain embodiments, the Cas9 variant is the VRER variant. In certain embodiments, the eiCas9 molecule is a S. pyogenes Cas9 variant. In certain embodiments, the Cas9 variant is the EQR variant. In certain embodiments, the Cas9 variant is the VRER variant. Cas9 variants are described, for example, in Kleinstiver et al., Nature, 523:481-485, 2015.

[1032] In certain embodiments, a Cas9 system comprises a Cas9 molecule, e.g., a Cas9 molecule described herein, e.g., the Cas9 EQR variant or the Cas9 VRER variant.

[1033] Following identification, gRNAs can be ranked into tiers based on their distance to the target site, their orthogonality and presence of a 5′ G (based on identification of close matches in the human genome containing a relevant PAM (e.g., for a S. pyogenes Cas9 EQR variant, the PAM may be a NGAG PAM, A NGCG PAM, a NGGG PAM, a NGTG PAM, a NGAA PAM, a NGAT PAM or a NGAC PAM).

[1034] Following identification, gRNAs can be ranked into tiers based on their distance to the target site, their orthogonality and presence of a 5′ G (based on identification of close matches in the human genome containing a relevant PAM (e.g., for a S. pyogenes Cas9 VRER variant, the PAM may be a NGCG PAM, A NGCA PAM, a NGCT PAM, or a NGCC PAM).

[1035] In some embodiments, the Cas9 molecule is a S. aureus Cas9 variant. In certain embodiments, the Cas9 variant is the KKH (E782K/N968K/R1015H) variant (see Kleinstiver et al. (2015) NAT. BIOTECHNOL. doi: 10.1038/nbt.3404, the entire contents of which are expressly incorporated herein by reference). In some embodiments, the Cas9 variant is the E782K/K929R/R1015H variant (see Kleinstiver et al. (2015)). In some embodiments, the Cas9 variant is the E782K/K929R/N968K/R1015H variant (see Kleinstiver et al. (2015). In some embodiments the Cas9 variant comprises one or more mutations in one of the following residues: E782, K929, N968, R1015. In some embodiments the Cas9 variant comprises one or more of the following mutations: E782K, K929R, N968K, R1015H and R1015Q (see Kleinstiver et al. (2015)). In certain embodiments, a Cas9 system comprises a Cas9 molecule, e.g., a Cas9 molecule described herein, e.g., the Cas9 KKH variant.

[1036] Following identification, gRNAs can be ranked into tiers based on their distance to the target site, their orthogonality and presence of a 5′ G (based on identification of close matches in the human genome containing a relevant PAM (e.g., for a S. aureus Cas9 KKH variant, the PAM may be a NNNRRT PAM (e.g., a NNNAGT PAM, a NNNGGT PAM, a NNNGAT PAM, or a NNNAAT PAM).

[1037] Alterations of the PI domain, which mediates PAM recognition are discussed below.

[1038] Synthetic Cas9 Molecules and Cas9 Polypeptides with Altered PI Domains

[1039] Current genome-editing methods are limited in the diversity of target sequences that can be targeted by the PAM sequence that is recognized by the Cas9 molecule utilized. A synthetic Cas9 molecule (or Syn-Cas9 molecule), or synthetic Cas9 polypeptide (or syn-Cas9 polypeptide), as that term is used herein, refers to a Cas9 molecule or Cas9 polypeptide that comprises a Cas9 core domain from one bacterial species and a functional altered PI domain, i.e., a PI domain other than that naturally associated with the Cas9 core domain, e.g., from a different bacterial species.

[1040] In an embodiment, the altered PI domain recognizes a PAM sequence that is different from the PAM sequence recognized by the naturally-occurring Cas9 from which the Cas9 core domain is derived. In an embodiment, the altered PI domain recognizes the same PAM sequence recognized by the naturally-occurring Cas9 from which the Cas9 core domain is derived, but with different affinity or specificity. A Syn-Cas9 molecule or Syn-Cas9 polypeptide can be, respectively, a Syn-eaCas9 molecule or Syn-eaCas9 polypeptide or a Syn-eiCas9 molecule Syn-eiCas9 polypeptide.

[1041] An exemplary Syn-Cas9 molecule Syn-Cas9 polypeptide comprises:
[1042] a) a Cas9 core domain, e.g., a Cas9 core domain from Table III.1 or 3, e.g., a S. aureus, S. pyogenes, or C. jejuni Cas9 core domain; and
[1043] b) an altered PI domain from a species X Cas9 sequence selected from Tables 111.4 and III.5.

[1044] In an embodiment, the RKR motif (the PAM binding motif) of said altered PI domain comprises: differences at 1, 2, or 3 amino acid residues; a difference in amino acid sequence at the first, second, or third position; differences in amino acid sequence at the first and second positions, the first and third positions, or the second and third positions; as compared with the sequence of the RKR motif of the native or endogenous PI domain associated with the Cas9 core domain.

[1045] In an embodiment, the Cas9 core domain comprises the Cas9 core domain from a species X Cas9 from Table III.1 and said altered PI domain comprises a PI domain from a species Y Cas9 from Table III.1.

[1046] In an embodiment, the RKR motif of the species X Cas9 is other than the RKR motif of the species Y Cas9.

[1047] In an embodiment, the RKR motif of the altered PI domain is selected from XXY, XNG, and XNQ.

[1048] In an embodiment, the altered PI domain has at least 60, 70, 80, 81, 82, 83, 84, 85, 86, 87, 88, 89, 90, 91, 92, 93, 94, 95, 96, 97, 98, 99 or 100% homology with the amino acid sequence of a naturally occurring PI domain of said species Y from Table III.1.

[1049] In an embodiment, the altered PI domain differs by no more than 50, 40, 30, 25, 20, 19, 18, 17, 16, 15, 14, 13, 12, 11, 10, 9, 8, 7, 6, 5, 4, 3, 2, or 1 amino acid residue from the amino acid sequence of a naturally occurring PI domain of said second species from Table III.1.

[1050] In an embodiment, the Cas9 core domain comprises a S. aureus core domain and altered PI domain comprises: an A. denitrificans PI domain; a C. jejuni PI domain; a H. mustelae PI domain; or an altered PI domain of species X PI domain, wherein species X is selected from Table III.4 or Table III.5.

[1051] In an embodiment, the Cas9 core domain comprises a S. pyogenes core domain and the altered PI domain comprises: an A. denitrificans PI domain; a C. jejuni PI domain; a H. mustelae PI domain; or an altered PI domain of species X PI domain, wherein species X is selected from Table III.4 or Table II.5.

[1052] In an embodiment, the Cas9 core domain comprises a C. jejuni core domain and the altered PI domain comprises: an A. denitrificans PI domain; a H. mustelae PI domain; or an altered PI domain of species X PI domain, wherein species X is selected from Table III.4 or Table III.5.

[1053] In an embodiment, the Cas9 molecule further comprises a linker disposed between said Cas9 core domain and said altered PI domain.

[1054] In an embodiment, the linker comprises: a linker described elsewhere herein disposed between the Cas9 core domain and the heterologous PI domain.

[1055] Exemplary altered PI domains for use in Syn-Cas9 molecules are described in Tables III.4 and III.5. The sequences for the 83 Cas9 orthologs referenced in Tables 111.4 and 111.5 are provided in Table III.1. Table III.2 provides the Cas9 orthologs with known PAM sequences and the corresponding RKR motif.

[1056] In an embodiment, a Syn-Cas9 molecule may also be size-optimized, e.g., the Syn-Cas9 molecule comprises one or more deletions, and optionally one or more linkers disposed between the amino acid residues flanking the deletions. In an embodiment, a Syn-Cas9 molecule comprises a REC deletion.

[1057] Size-Optimized Cas9 Molecules

[1058] Engineered Cas9 molecules and engineered Cas9 polypeptides, as described herein, include a Cas9 molecule or Cas9 polypeptide comprising a deletion that reduces the size of the molecule while still retaining desired Cas9 properties, e.g., essentially native conformation, Cas9 nuclease activity, and/or target nucleic acid molecule recognition. Provided herein are Cas9 molecules or Cas9 polypeptides comprising one or more deletions, and optionally one or more linkers, wherein a linker is disposed between the amino acid residues that flank the deletion. Methods for identifying suitable deletions in a reference Cas9 molecule, methods for generating Cas9 molecules with a deletion and a linker, and methods for using such Cas9 molecules will be apparent to one of ordinary skill in the art upon review of this document.

[1059] A Cas9 molecule, e.g., a S. aureus, S. pyogenes, or C. jejuni, Cas9 molecule, having a deletion is smaller, e.g., has reduced number of amino acids, than the corresponding naturally-occurring Cas9 molecule. The smaller size of the Cas9 molecules allows increased flexibility for delivery methods, and thereby increases utility for genome-editing. A Cas9 molecule can comprise one or more deletions that do not substantially affect or decrease the activity of the resultant Cas9 molecules described herein. Activities that are retained in the Cas9 molecules comprising a deletion as described herein include one or more of the following:
[1060] a nickase activity, i.e., the ability to cleave a single strand, e.g., the non-complementary strand or the complementary strand, of a nucleic acid molecule; a double stranded nuclease activity, i.e., the ability to cleave both strands of a double stranded nucleic acid and create a double strand break, which in an embodiment is the presence of two nickase activities;
[1061] an endonuclease activity;
[1062] an exonuclease activity;
[1063] a helicase activity, i.e., the ability to unwind the helical structure of a double stranded nucleic acid;
[1064] and recognition activity of a nucleic acid molecule, e.g., a target nucleic acid or a gRNA.

[1065] Activity of the Cas9 molecules described herein can be assessed using the activity assays described herein or in the art.

[1066] Identifying Regions Suitable for Deletion

[1067] Suitable regions of Cas9 molecules for deletion can be identified by a variety of methods. Naturally-occurring orthologous Cas9 molecules from various bacterial species, e.g., any one of those listed in Table III.1, can be modeled onto the crystal structure of S. pyogenes Cas9 (Nishimasu et al. (2014) CELL, 156: 935-949) to examine the level of conservation across the selected Cas9 orthologs with respect to the three-dimensional conformation of the protein. Less conserved or unconserved regions that are located spatially distant from regions involved in Cas9 activity, e.g., the interface with a target nucleic acid molecule and/or gRNA, represent regions or domains that are candidates for deletion without substantially affecting or decreasing Cas9 activity.

[1068] REC-Optimized Cas9 Molecules

[1069] A REC-optimized Cas9 molecule, as that term is used herein, refers to a Cas9 molecule that comprises a deletion in one or both of the REC2 domain and the RE1_{CT} domain (collectively a REC deletion), wherein the deletion comprises at least 10% of the amino acid residues in the cognate domain. A REC-optimized Cas9 molecule can be an eaCas9 molecule or an eiCas9 molecule. An exemplary REC-optimized Cas9 molecule comprises:
[1070] a) a deletion selected from:
   [1071] i) a REC2 deletion;
   [1072] ii) a REC1_{CT} deletion; or
   [1073] iii) a REC1_{SUB} deletion.

[1074] Optionally, a linker is disposed between the amino acid residues that flank the deletion. In an embodiment a Cas9 molecule includes only one deletion, or only two deletions. A Cas9 molecule can comprise a REC2 deletion and a REC1_{CT} deletion. A Cas9 molecule can comprise a REC2 deletion and a REC1_{SUB} deletion.

[1075] Generally, the deletion will contain at least 10% of the amino acids in the cognate domain, e.g., a REC2 deletion will include at least 10% of the amino acids in the REC2 domain.

[1076] A deletion can comprise: at least 10, 20, 30, 40, 50, 60, 70, 80, or 90% of the amino acid residues of its cognate domain; all of the amino acid residues of its cognate domain; an amino acid residue outside its cognate domain; a plurality of amino acid residues outside its cognate domain; the amino acid residue immediately N terminal to its cognate domain; the amino acid residue immediately C terminal to its cognate domain; the amino acid residue immediately N terminal to its cognate and the amino acid residue immediately C terminal to its cognate domain; a plurality of, e.g., up to 5, 10, 15, or 20, amino acid residues N terminal to its cognate domain; a plurality of, e.g., up to 5, 10, 15, or 20, amino acid residues C terminal to its cognate domain; a plurality of, e.g., up to 5, 10, 15, or 20, amino acid residues N terminal to its cognate domain and a plurality of e.g., up to 5, 10, 15, or 20, amino acid residues C terminal to its cognate domain.

[1077] In an embodiment, a deletion does not extend beyond: its cognate domain; the N terminal amino acid residue of its cognate domain; the C terminal amino acid residue of its cognate domain.

[1078] A REC-optimized Cas9 molecule can include a linker disposed between the amino acid residues that flank the deletion. Linkers for use in generating recombinant proteins, e.g., multi-domain proteins, are known in the art (Chen et al. (2013) ADV. DRUG DELIVERYREV. 65:1357-69). Any linkers known in the art that maintain the conformation or native fold of the Cas9 molecule (thereby retaining Cas9 activity) can be used. Several properties of linkers, such as length, hydrophobicity, intrinsic properties of the amino acids residues themselves, and secondary structure should be considered in the context of the goal to maintain native conformation and functional activity of Cas9. Any linkers known in the art that maintain the conformation or native fold of the Cas9 molecule (thereby retaining Cas9 activity) can be used. Several properties of linkers, such as length, hydrophobicity, intrinsic properties of the amino acids residues themselves, and secondary structure should be considered in the context of the goal to maintain native conformation and functional activity of Cas9.

[1079] A flexible linker can be utilized in the Cas9 molecules described herein. Flexible linkers allow a certain degree of movement and/or interaction within and between the joined domains or regions of the protein. Generally, flexible linkers are composed of small, non-polar (e.g., Gly) or polar (e.g., Ser or Thr) amino acids. The small size of these amino acids provides flexibility and allows mobility of the connected domains or regions. Furthermore, the incorporation of Ser or Thr can help maintain the stability of the linker in aqueous solutions by hydrogen bonding with the water molecules, thereby reducing unfavorable interactions between the linker and the other protein moieties. Commonly used flexible linkers are comprised of sequences that primarily consist of Gly and Ser residues. Often, these flexible linkers consist of repeating units of a combination of Gly and Ser residues, e.g., (GGS)ₓ, where the number of repeating units, e.g., x, can be optimized to achieve the appropriate separation of other domains or regions of the protein.

[1080] In some cases, a rigid linker may be preferred if there is significant distance between the joined domains or regions, or to maintain a fixed distance between the joined domains or regions of a protein and independent functions of the domains/regions. Rigid linkers often have defined secondary structure, e.g., alpha helix, or other stabilizing interactions, e.g., salt bridges and disulfide bonds. Rigid linkers commonly contain multiple Pro residues, or repeating combinations of Glu-Pro or Lys-Pro because Pro imposes a strong conformation constraint due to its structure.

[1081] The linker can comprise an amino acid residue, e.g., 1, 2, 3, 4, 5, 6, 7, 8, 9, or 10 amino acid residues. Typically, the linker will comprises less than 10, 20 or 30 amino acid residues. Typically, the linker is less than 50, 40, 30, 20, 10, or 5% of the length of the deleted sequence. Suitable linkers include: [Gly-Ser]ₓ, wherein x is 1, 2, 3, 4, 5, 6, 7, 8, 9, or 10 (SEQ ID NO: 341); [Gly-Gly-Ser]ₓ, wherein x is 1, 2, 3, 4, 5, 6, 7, 8, 9, or 10 (SEQ ID NO: 339); [Gly-Gly-Ser]; [Gly-Ser-Gly-Ser]ₓ, wherein x is 1, 2, 3, 4, or 5 (SEQ ID NO: 127); [Gly-Ser-Gly-Ser] (SEQ ID NO: 128); (GSAGSAAGSGEF)ₓ, wherein x is 1, 2, 3 or 4 (SEQ ID NO: 201); (SIVAQLSRPDPA) x(SEQ ID NO: 202), wherein x is 1, 2, 3 or 4; or an XTEN sequence, e.g., the XTEN sequence of SEQ ID NO: #______, or a sequence that differs therefrom by no more than 1, 2, 3, 4, 5, 6, 7, 8, 9 or 10 amino acid residues. In an embodiment linker comprises an amino acid sequence other than a sequence within REC2.

[1082] In an embodiment, a REC-optimized Cas9 molecule comprises an amino acid sequence that, other than any REC deletion and associated linker, has at least 50, 55, 60, 65, 70, 75, 80, 81, 82, 83, 84, 85, 86, 87, 88, 89, 90, 91, 92, 93, 94, 95, 96, 97, 98, 99, or 100% homology with the amino acid sequence of a naturally occurring Cas9, e.g., a Cas9 molecule described in Table III.1, e.g., a S. aureus Cas9 molecule, a S. pyogenes Cas9 molecule, or a C. jejuni Cas9 molecule.

[1083] In an embodiment, a REC-optimized Cas9 molecule comprises an amino acid sequence that, other than any REC deletion and associated linker, differs by no more than 1, 2, 3, 4, 5, 6, 7, 8, 9, 10, 11, 12, 13, 14, 15, 16, 17, 18, 19, 20, 21, 22, 23, 24, or 25 amino acid residues from the amino acid sequence of a naturally occurring Cas9, e.g., a Cas9 molecule described in Table III.1, e.g., a S. aureus Cas9 molecule, a S. pyogenes Cas9 molecule, or a C. jejuni Cas9 molecule.

[1084] In an embodiment, a REC-optimized Cas9 molecule comprises an amino acid sequence that, other than any REC deletion and associate linker, differs by no more than 1, 2, 3, 4, 5, 6, 7, 8, 9, 10, 11, 12, 13, 14, 15, 16, 17, 18, 19, 20, 21, 22, 23, 24, or 25% of the amino acid residues from the amino acid sequence of a naturally occurring Cas9, e.g., a Cas9 molecule described in Table III.1, e.g., a S. aureus Cas9 molecule, a S. pyogenes Cas9 molecule, or a C. jejuni Cas9 molecule.

[1085] For sequence comparison, typically one sequence acts as a reference sequence, to which test sequences are compared. When using a sequence comparison algorithm, test and reference sequences are entered into a computer, subsequence coordinates are designated, if necessary, and sequence algorithm program parameters are designated. Default program parameters can be used, or alternative parameters can be designated. The sequence comparison algorithm then calculates the percent sequence identities for the test sequences relative to the reference sequence, based on the program parameters. Methods of alignment of sequences for comparison are well known in the art. Optimal alignment of sequences for comparison can be conducted, e.g., by the local homology algorithm of Smith and Waterman (1970) ADV. APPL. MATH. 2: 482c, by the homology alignment algorithm of Needleman and Wunsch, (1970) J. MOL. BIOL. 48:443, by the search for similarity method of Pearson and Lipman, (1988) PROC. NAT′L. ACAD. SCI. USA 85:2444, by computerized implementations of these algorithms (GAP, BESTFIT, FASTA, and TFASTA in the Wisconsin Genetics Software Package, Genetics Computer Group, 575 Science Dr., Madison, WI), or by manual alignment and visual inspection (see, e.g., Brent et al., (2003) CURRENT PROTOCOLS IN MOLECULAR BIOLOGY).

[1086] Two examples of algorithms that are suitable for determining percent sequence identity and sequence similarity are the BLAST and BLAST 2.0 algorithms, which are described in Altschul et al. (1977) NUC. ACIDS RES. 25: 3389-3402; and Altschul et al. (1990) J. MOL. BIOL. 215: 403-410, respectively. Software for performing BLAST analyses is publicly available through the National Center for Biotechnology Information.

[1087] The percent identity between two amino acid sequences can also be determined using the algorithm of E. Meyers and W. Miller (1988) COMPUT. APPL. BIOSCI. 4:11-17, which has been incorporated into the ALIGN program (version 2.0), using a PAM120 weight residue table, a gap length penalty of 12 and a gap penalty of 4. In addition, the percent identity between two amino acid sequences can be determined using the Needleman and Wunsch (1970) J. MOL. BIOL. 48:444-453 algorithm which has been incorporated into the GAP program in the GCG software package (available at www.gcg.com), using either a Blossom 62 matrix or a PAM250 matrix, and a gap weight of 16, 14, 12, 10, 8, 6, or 4 and a length weight of 1, 2, 3, 4, 5, or 6.

[1088] Sequence information for exemplary REC deletions are provided for 83 naturally-occurring Cas9 orthologs in Table III.1.

[1089] The amino acid sequences of exemplary Cas9 molecules from different bacterial species are shown below.

TABLE III.1
Amino Acid Sequence of Cas9 Orthologs

| | | REC2 | | | REC1_{CT} | | | REC_{sub} | | |
|---|---|---|---|---|---|---|---|---|---|---|
| | | start | stop | # AA | start | stop | # AA | start | stop | # AA |
| | Amino acid | (AA | (AA | deleted | (AA | (AA | deleted | (AA | (AA | deleted |
| Species/Composite ID | sequence | pos) | pos) | (n) | pos) | pos) | (n) | pos) | pos) | (n) |
| Staphylococcus aureus | SEQ ID NO: 6 | 126 | 166 | 41 | 296 | 352 | 57 | 296 | 352 | 57 |
| tr\|J7RUA5\|J7RUA5_STAAU | | | | | | | | | | |
| Streptococcus pyogenes | SEQ ID NO: 7 | 176 | 314 | 139 | 511 | 592 | 82 | 511 | 592 | 82 |
| sp\|Q99ZW2\|CAS9_STRP1 | | | | | | | | | | |
| Campylobacter jejuni NCTC | SEQ ID NO: 8 | 137 | 181 | 45 | 316 | 360 | 45 | 316 | 360 | 45 |
| 11168 | | | | | | | | | | |
| gi\|218563121\|ref\|YP_002344900.1 | | | | | | | | | | |
| Bacteroides fragilis NCTC 9343 | SEQ ID NO: 9 | 148 | 339 | 192 | 524 | 617 | 84 | 524 | 617 | 84 |
| gi\|60683389\|ref\|YP_213533.1\| | | | | | | | | | | |
| Bifidobacterium bifidum S17 | SEQ ID NO: | 173 | 335 | 163 | 516 | 607 | 87 | 516 | 607 | 87 |
| gi\|310286728\|ref\|YP_003937986. | 10 | | | | | | | | | |
| Veillonella atypica ACS-134-V- | SEQ ID NO: | 185 | 339 | 155 | 574 | 663 | 79 | 574 | 663 | 79 |
| Col7a | 11 | | | | | | | | | |
| gi\|303229466\|ref\|ZP_07316256.1 | | | | | | | | | | |
| Lactobacillus rhamnosus GG | SEQ ID NO: | 169 | 320 | 152 | 559 | 645 | 78 | 559 | 645 | 78 |
| gi\|258509199\|ref\|YP_003171950.1 | 12 | | | | | | | | | |
| Filifactor alocis ATCC 35896 | SEQ ID NO: | 166 | 314 | 149 | 508 | 592 | 76 | 508 | 592 | 76 |
| gi\|374307738\|ref\|YP_005054169.1 | 13 | | | | | | | | | |
| Oenococcus kitaharae DSM | SEQ ID NO: | 169 | 317 | 149 | 555 | 639 | 80 | 555 | 639 | 80 |
| 17330 | 14 | | | | | | | | | |
| gi\|366983953\|gb\|EHN59352.1\| | | | | | | | | | | |
| Fructobacillus fructosus KCTC | SEQ ID NO: | 168 | 314 | 147 | 488 | 571 | 76 | 488 | 571 | 76 |
| 3544 | 15 | | | | | | | | | |
| gi\|339625081\|ref\|ZP_08660870.1 | | | | | | | | | | |
| Catenibacterium mitsuokai DSM | SEQ ID NO: | 173 | 318 | 146 | 511 | 594 | 78 | 511 | 594 | 78 |
| 15897 | 16 | | | | | | | | | |
| gi\|224543312\|ref\|ZP_03683851.1 | | | | | | | | | | |
| Finegoldia magna ATCC 29328 | SEQ ID NO: | 168 | 313 | 146 | 452 | 534 | 77 | 452 | 534 | 77 |
| gi\|169823755\|ref\|YP_001691366.1 | 17 | | | | | | | | | |
| CoriobacteriumglomeransPW2 | SEQ ID NO: | 175 | 318 | 144 | 511 | 592 | 82 | 511 | 592 | 82 |
| gi\|328956315\|ref\|YP_004373648.1 | 18 | | | | | | | | | |
| Eubacterium yurii ATCC 43715 | SEQ ID NO: | 169 | 310 | 142 | 552 | 633 | 76 | 552 | 633 | 76 |
| gi\|306821691\|ref\|ZP_07455288.1 | 19 | | | | | | | | | |
| Peptoniphilus duerdenii ATCC | SEQ ID NO: | 171 | 311 | 141 | 535 | 615 | 76 | 535 | 615 | 76 |
| BAA-1640 | 20 | | | | | | | | | |
| gi\|1304438954\|ref\|ZP_07398877.1 | | | | | | | | | | |
| Acidaminococcus sp. D21 | SEQ ID NO: | 167 | 306 | 140 | 511 | 591 | 75 | 511 | 591 | 75 |
| gi\|1227824983\|ref\|ZP_03989815.1 | 21 | | | | | | | | | |
| Lactobacillus farciminis KCTC | SEQ ID NO: | 171 | 310 | 140 | 542 | 621 | 85 | 542 | 621 | 85 |
| 3681 | 22 | | | | | | | | | |
| gi\|336394882\|ref\|ZP_08576281.1 | | | | | | | | | | |
| Streptococcus sanguinis SK49 | SEQ ID NO: | 185 | 324 | 140 | 411 | 490 | 85 | 411 | 490 | 85 |
| gi\|422884106\|ref\|ZP_16930555.1 | 23 | | | | | | | | | |
| Coprococcus catus GD-7 | SEQ ID NO: | 172 | 310 | 139 | 556 | 634 | 76 | 556 | 634 | 76 |
| gi\|291520705\|emb\|CBK78998.1\| | 24 | | | | | | | | | |
| Streptococcus mutans UA159 | SEQ ID NO: | 176 | 314 | 139 | 392 | 470 | 84 | 392 | 470 | 84 |
| gi\|24379809\|ref\|NP_721764.1\| | 25 | | | | | | | | | |
| Streptococcus pyogenes M1 GAS | SEQ ID NO: | 176 | 314 | 139 | 523 | 600 | 82 | 523 | 600 | 82 |
| gi\|13622193\|gb\|AAK33936.1\| | 26 | | | | | | | | | |
| Streptococcus thermophilus | SEQ ID NO: | 176 | 314 | 139 | 481 | 558 | 81 | 481 | 558 | 81 |
| LMD-9 | 27 | | | | | | | | | |
| gi\|116628213\|ref\|YP_820832.1\| | | | | | | | | | | |
| Fusobacteriumnucleatum | SEQ ID NO: | 171 | 308 | 138 | 537 | 614 | 76 | 537 | 614 | 76 |
| ATCC49256 | 28 | | | | | | | | | |
| gi\|34762592\|ref\|ZP_00143587.1\| | | | | | | | | | | |
| Planococcus antarcticus DSM | SEQ ID NO: | 162 | 299 | 138 | 538 | 614 | 94 | 538 | 614 | 94 |
| 14505 | 29 | | | | | | | | | |
| gi\|389815359\|ref\|ZP_10206685.1 | | | | | | | | | | |
| Treponema denticola ATCC | SEQ ID NO: | 169 | 305 | 137 | 524 | 600 | 81 | 524 | 600 | 81 |
| 35405 | 30 | | | | | | | | | |
| gi\|42525843\|ref\|NP_970941.1\| | | | | | | | | | | |
| Solobacterium moorei F0204 | SEQ ID NO: | 179 | 314 | 136 | 544 | 619 | 77 | 544 | 619 | 77 |
| gi\|320528778\|ref\|ZP_08029929.1 | 31 | | | | | | | | | |
| Staphylococcus | SEQ ID NO: | 164 | 299 | 136 | 531 | 606 | 92 | 531 | 606 | 92 |
| pseudintermedius ED99 | 32 | | | | | | | | | |
| gi\|323463801\|gb\|ADX75954.1\| | | | | | | | | | | |
| Flavobacterium branchiophilum | SEQ ID NO: | 162 | 286 | 125 | 538 | 613 | 63 | 538 | 613 | 63 |
| FL-15 | 33 | | | | | | | | | |
| gi\|1347536497\|ref\|YP_004843922.1 | | | | | | | | | | |
| Ignavibacterium album JCM | SEQ ID NO: | 223 | 329 | 107 | 357 | 432 | 90 | 357 | 432 | 90 |
| 16511 | 34 | | | | | | | | | |
| gi\|385811609\|ref\|YP_005848005.1 | | | | | | | | | | |
| Bergeyella zoohelcum ATCC | SEQ ID NO: | 165 | 261 | 97 | 529 | 604 | 56 | 529 | 604 | 56 |
| 43767 | 35 | | | | | | | | | |
| gi\|423317190\|ref\|ZP_17295095.1 | | | | | | | | | | |
| Nitrobacter hamburgensis X14 | SEQ ID NO: | 169 | 253 | 85 | 536 | 611 | 48 | 536 | 611 | 48 |
| gi\|92109262\|ref\|YP_571550.1\| | 36 | | | | | | | | | |
| Odoribacter laneus YIT 12061 | SEQ ID NO: | 164 | 242 | 79 | 535 | 610 | 63 | 535 | 610 | 63 |
| gi\|374384763\|ref\|ZP_09642280.1 | 37 | | | | | | | | | |
| Legionella pneumophila str. Paris | SEQ ID NO: | 164 | 239 | 76 | 402 | 476 | 67 | 402 | 476 | 67 |
| gi\|54296138\|ref\|YP_122507.1\| | 38 | | | | | | | | | |
| Bacteroides sp. 20 3 | SEQ ID NO: | 198 | 269 | 72 | 530 | 604 | 83 | 530 | 604 | 83 |
| gi\|301311869\|ref\|ZP_07217791.1 | 39 | | | | | | | | | |
| Akkermansia muciniphila ATCC | SEQ ID NO: | 136 | 202 | 67 | 348 | 418 | 62 | 348 | 418 | 62 |
| BAA-835 | 40 | | | | | | | | | |
| gi\|187736489\|ref\|YP_001878601. | | | | | | | | | | |
| Prevotella sp. C561 | SEQ ID NO: | 184 | 250 | 67 | 357 | 425 | 78 | 357 | 425 | 78 |
| gi\|345885718\|ref\|ZP_08837074.1 | 41 | | | | | | | | | |
| Wolinella succinogenes DSM | SEQ ID NO: | 157 | 218 | 36 | 401 | 468 | 60 | 401 | 468 | 60 |
| 1740 | 42 | | | | | | | | | |
| gi\|34557932\|ref\|NP_907747.1\| | | | | | | | | | | |
| Alicyclobacillus hesperidum | SEQ ID NO: | 142 | 196 | 55 | 416 | 482 | 61 | 416 | 482 | 61 |
| URH17-3-68 | 43 | | | | | | | | | |
| gi\|403744858\|ref\|ZP_10953934.1 | | | | | | | | | | |
| Caenispirillum salinarum AK4 | SEQ ID NO: | 161 | 214 | 54 | 330 | 393 | 68 | 330 | 393 | 68 |
| gi\|427429481\|ref\|ZP_18919511.1 | 44 | | | | | | | | | |
| Eubacterium rectale ATCC 33656 | SEQ ID NO: | 133 | 185 | 53 | 322 | 384 | 60 | 322 | 384 | 60 |
| gi\|238924075\|ref\|YP_002937591.1 | 45 | | | | | | | | | |
| Mycoplasma synoviae 53 | SEQ ID NO: | 187 | 239 | 53 | 319 | 381 | 80 | 319 | 381 | 80 |
| gi\|71894592\|ref\|YP_278700.1\| | 46 | | | | | | | | | |
| Porphyromonas sp. oral taxon | SEQ ID NO: | 150 | 202 | 53 | 309 | 371 | 60 | 309 | 371 | 60 |
| 279 str. F0450 | 47 | | | | | | | | | |
| gi\|402847315\|ref\|ZP_10895610.1 | | | | | | | | | | |
| Streptococcus thermophilus | SEQ ID NO: | 127 | 178 | 139 | 424 | 486 | 81 | 424 | 486 | 81 |
| LMD-9 | 48 | | | | | | | | | |
| gi\|116627542\|ref\|YP_820161.1\| | | | | | | | | | | |
| Roseburia inulinivorans DSM | SEQ ID NO: | 154 | 204 | 51 | 318 | 380 | 69 | 318 | 380 | 69 |
| 16841 | 49 | | | | | | | | | |
| gi\|225377804\|ref\|ZP_03755025.1 | | | | | | | | | | |
| Methylosinus trichosporium | SEQ ID NO: | 144 | 193 | 50 | 426 | 488 | 64 | 426 | 488 | 64 |
| OB3b | 50 | | | | | | | | | |
| gi\|296446027\|ref\|ZP_06887976.1 | | | | | | | | | | |
| Ruminococcus albus 8 | SEQ ID NO: | 139 | 187 | 49 | 351 | 412 | 55 | 351 | 412 | 55 |
| gi\|325677756\|ref\|ZP_08157403.1 | 51 | | | | | | | | | |
| Bifidobacterium longum DJO10A | SEQ ID NO: | 183 | 230 | 48 | 370 | 431 | 44 | 370 | 431 | 44 |
| gi\|189440764\|ref\|YP_001955845. | 52 | | | | | | | | | |
| Enterococcus faecalis TX0012 | SEQ ID NO: | 123 | 170 | 48 | 327 | 387 | 60 | 327 | 387 | 60 |
| gi\|315149830\|gb\|EFT93846.1\| | 53 | | | | | | | | | |
| Mycoplasma mobile 163K | SEQ ID NO: | 179 | 226 | 48 | 314 | 374 | 79 | 314 | 374 | 79 |
| gi\|47458868\|ref\|YP_015730.1\| | 54 | | | | | | | | | |
| Actinomyces coleocanis DSM | SEQ ID NO: | 147 | 193 | 47 | 358 | 418 | 40 | 358 | 418 | 40 |
| 15436 | 55 | | | | | | | | | |
| gi\|227494853\|ref\|ZP_03925169.1 | | | | | | | | | | |
| Dinoroseobacter shibae DFL 12 | SEQ ID NO: | 138 | 184 | 47 | 338 | 398 | 48 | 338 | 398 | 48 |
| gi\|159042956\|ref\|YP_001531750.1 | 56 | | | | | | | | | |
| Actinomyces sp. oral taxon 180 | SEQ ID NO: | 183 | 228 | 46 | 349 | 409 | 40 | 349 | 409 | 40 |
| str. F0310 | 57 | | | | | | | | | |
| gi\|315605738\|ref\|ZP_07880770.1 | | | | | | | | | | |
| Alcanivorax sp. W11-5 | SEQ ID NO: | 139 | 183 | 45 | 344 | 404 | 61 | 344 | 404 | 61 |
| gi\|407803669\|ref\|ZP_11150502.1 | 58 | | | | | | | | | |
| Aminomonas paucivorans DSM | SEQ ID NO: | 134 | 178 | 45 | 341 | 401 | 63 | 341 | 401 | 63 |
| 12260 | 59 | | | | | | | | | |
| gi\|312879015\|ref\|ZP_07738815.1 | | | | | | | | | | |
| Mycoplasma canis PG 14 | SEQ ID NO: | 139 | 183 | 45 | 319 | 379 | 76 | 319 | 379 | 76 |
| gi\|384393286\|gb\|EIE39736.1\| | 60 | | | | | | | | | |
| Lactobacillus coryniformis KCTC | SEQ ID NO: | 141 | 184 | 44 | 328 | 387 | 61 | 328 | 387 | 61 |
| 3535 | 61 | | | | | | | | | |
| gi\|336393381\|ref\|ZP_08574780.1 | | | | | | | | | | |
| Elusimicrobium minutum Pei191 | SEQ ID NO: | 177 | 219 | 43 | 322 | 381 | 47 | 322 | 381 | 47 |
| gi\|187250660\|ref\|YP_001875142.1 | 62 | | | | | | | | | |
| Neisseria meningitidis Z2491 | SEQ ID NO: | 147 | 189 | 43 | 360 | 419 | 61 | 360 | 419 | 61 |
| gi\|218767588\|ref\|YP_002342100.1 | 63 | | | | | | | | | |
| Pasteurella multocida str. Pm70 | SEQ ID NO: | 139 | 181 | 43 | 319 | 378 | 61 | 319 | 378 | 61 |
| gi\|15602992\|ref\|NP_246064.1\| | 64 | | | | | | | | | |
| Rhodovulum sp. PH10 | SEQ ID NO: | 141 | 183 | 43 | 319 | 378 | 48 | 319 | 378 | 48 |
| gi\|402849997\|ref\|ZP_10898214.1 | 65 | | | | | | | | | |
| Eubacterium dolichum DSM | SEQ ID NO: | 131 | 172 | 42 | 303 | 361 | 59 | 303 | 361 | 59 |
| 3991 | 66 | | | | | | | | | |
| gi\|160915782\|ref\|ZP_02077990.1 | | | | | | | | | | |
| Nitratifractor salsuginis DSM | SEQ ID NO: | 143 | 184 | 42 | 347 | 404 | 61 | 347 | 404 | 61 |
| 16511 | 67 | | | | | | | | | |
| gi\|319957206\|ref\|YP_004168469.1 | | | | | | | | | | |
| Rhodospirillum rubrum ATCC | SEQ ID NO: | 139 | 180 | 42 | 314 | 371 | 55 | 314 | 371 | 55 |
| 11170 | 68 | | | | | | | | | |
| gi\|83591793\|ref\|YP_425545.1\| | | | | | | | | | | |
| Clostridium cellulolyticum H10 | SEQ ID NO: | 137 | 176 | 40 | 320 | 376 | 61 | 320 | 376 | 61 |
| gi\|220930482\|ref\|YP_002507391.1 | 69 | | | | | | | | | |
| Helicobacter mustelae 12198 | SEQ ID NO: | 148 | 187 | 40 | 298 | 354 | 48 | 298 | 354 | 48 |
| gi\|291276265\|ref\|YP_003516037.1 | 70 | | | | | | | | | |
| Ilyobacter polytropus DSM 2926 | SEQ ID NO: | 134 | 173 | 40 | 462 | 517 | 63 | 462 | 517 | 63 |
| gi\|310780384\|ref\|YP_003968716.1 | 71 | | | | | | | | | |
| Sphaerochaeta globus str. Buddy | SEQ ID NO: | 163 | 202 | 40 | 335 | 389 | 45 | 335 | 389 | 45 |
| gi\|325972003\|ref\|YP_004248194.1 | 72 | | | | | | | | | |
| Staphylococcus lugdunensis | SEQ ID NO: | 128 | 167 | 40 | 337 | 391 | 57 | 337 | 391 | 57 |
| M23590 | 73 | | | | | | | | | |
| gi\|315659848\|ref\|ZP_07912707.1 | | | | | | | | | | |
| Treponema sp. JC4 | SEQ ID NO: | 144 | 183 | 40 | 328 | 382 | 63 | 328 | 382 | 63 |
| gi\|384109266\|ref\|ZP_10010146.1 | 74 | | | | | | | | | |
| uncultured delta | SEQ ID NO: | 154 | 193 | 40 | 313 | 365 | 55 | 313 | 365 | 55 |
| proteobacterium HF0070 07E19 | 75 | | | | | | | | | |
| gi\|297182908\|gb\|ADI19058.1\| | | | | | | | | | | |
| Alicycliphilus denitrificans K601 | SEQ ID NO: | 140 | 178 | 39 | 317 | 366 | 48 | 317 | 366 | 48 |
| gi\|330822845\|ref\|YP_004386148.1 | 76 | | | | | | | | | |
| Azospirillum sp. B510 | SEQ ID NO: | 205 | 243 | 39 | 342 | 389 | 46 | 342 | 389 | 46 |
| gi\|288957741\|ref\|YP_003448082.1 | 77 | | | | | | | | | |
| Bradyrhizobium sp. BTAi1 | SEQ ID NO: | 143 | 181 | 39 | 323 | 370 | 48 | 323 | 370 | 48 |
| gi\|148255343\|ref\|YP_001239928.1 | 78 | | | | | | | | | |
| Parvibaculum lavamentivorans | SEQ ID NO: | 138 | 176 | 39 | 327 | 374 | 58 | 327 | 374 | 58 |
| DS-1 | 79 | | | | | | | | | |
| gi\|154250555\|ref\|YP_001411379.1 | | | | | | | | | | |
| Prevotella timonensis CRIS 5C-B1 | SEQ ID NO: | 170 | 208 | 39 | 328 | 375 | 61 | 328 | 375 | 61 |
| gi\|282880052\|ref\|ZP_06288774.1 | 80 | | | | | | | | | |
| Bacillus smithii 7 3 47FAA | SEQ ID NO: | 134 | 171 | 38 | 401 | 448 | 63 | 401 | 448 | 63 |
| gi\|365156657\|ref\|ZP_09352959.1 | 81 | | | | | | | | | |
| Cand. Puniceispirillum marinum | SEQ ID NO: | 135 | 172 | 38 | 344 | 391 | 53 | 344 | 391 | 53 |
| IMCC1322 | 82 | | | | | | | | | |
| gi\|294086111\|ref\|YP_003552871.1 | | | | | | | | | | |
| Barnesiella intestinihominis YIT | SEQ ID NO: | 140 | 176 | 37 | 371 | 417 | 60 | 371 | 417 | 60 |
| 11860 | 83 | | | | | | | | | |
| gi\|404487228\|ref\|ZP_11022414.1 | | | | | | | | | | |
| Ralstonia syzygii R24 | SEQ ID NO: | 140 | 176 | 37 | 395 | 440 | 50 | 395 | 440 | 50 |
| gi\|344171927\|emb\|CCA84553.1\| | 84 | | | | | | | | | |
| Wolinella succinogenes DSM | SEQ ID NO: | 145 | 180 | 36 | 348 | 392 | 60 | 348 | 392 | 60 |
| 1740 | 86 | | | | | | | | | |
| gi\|34557790\|ref\|NP_907605.1\| | | | | | | | | | | |
| Mycoplasma gallisepticum str. F | SEQ ID NO: | 144 | 177 | 34 | 373 | 416 | 71 | 373 | 416 | 71 |
| gi\|284931710\|gb\|ADC31648.1\| | 87 | | | | | | | | | |
| Acidothermus cellulolyticus 11B | SEQ ID NO: | 150 | 182 | 33 | 341 | 380 | 58 | 341 | 380 | 58 |
| gi\|117929158\|ref\|YP_873709.1\| | 88 | | | | | | | | | |
| Mycoplasma ovipneumoniae | SEQ ID NO: | 156 | 184 | 29 | 381 | 420 | 62 | 381 | 420 | 62 |
| SC01 | 89 | | | | | | | | | |
| gi\|363542550\|ref\|ZP_09312133.1 | | | | | | | | | | |

[1090] If any of the above Cas9 sequences are fused with a peptide or polypeptide at the C-terminus, it is understood that the stop codon will be removed.

[1091] Exemplary PAM sequences and their corresponding RKR motifs are provided in Table III.2.

TABLE III.2
Identified PAM sequences and corresponding
RKR motifs.

| | | RKR |
|---|---|---|
| | PAM sequence | motif |
| Strain Name | (NA) | (AA) |
| Streptococcus pyogenes | NGG | RKR |
| Streptococcus mutans | NGG | RKR |
| Streptococcus | NGGNG | RYR |
| thermophilus A | | |
| Treponema denticola | NAAAAN | VAK |
| Streptococcus | NNAAAAW | IYK |
| thermophilus B | | |
| Campylobacter jejuni | NNNNACA | NLK |
| Pasteurella multocida | GNNNCNNA | KDG |
| Neisseria meningitidis | NNNNGATT or | IGK |
| | NNGRRT | |
| | (R = A or G) | |
| Staphylococcus aureus | NNGRR | NDK |
| | (R = A or G) | |

[1092] Exemplary Cas9 core domains are provided in Table III.3.

TABLE III.3
Amino Acid Sequence of Cas9 Core Domains

| | Cas9 Start | Cas9 Stop |
|---|---|---|
| Strain Name | (AA pos) | (AA pos) |
| | Start and Stop numbers refer to the | |
| | sequence in Table III.1 | |
| Staphylococcus aureus | 1 | 772 |
| Streptococcus pyogenes | 1 | 1099 |
| Campulobacter jejuni | 1 | 741 |

[1093] Exemplary PI domains, e.g., altered PI domains, are provided in Tables 111.4 and 111.5.

TABLE III.4
Altered PI Domains

| | PI Start | PI Stop | Length of PI | RKR motif |
|---|---|---|---|---|
| Strain Name | (AA pos) | (AA POS) | (AA) | (AA) |
| | Start and Stop numbers | | | |
| | refer to the sequences in | | | |
| | Table III.1 | | | |
| Alicycliphilus denitrificans K601 | 837 | 1029 | 193 | --Y |
| Campylobacter jejuni NCTC 11168 | 741 | 984 | 244 | -NG |
| Helicobacter mustelae 12198 | 771 | 1024 | 254 | -NQ |

TABLE III.5
Other Altered PI Domains

| | PI Start | PI Stop | Length of PI | RKR motif |
|---|---|---|---|---|
| Strain Name | (AA pos) | (AA Pos) | (AA) | (AA) |
| | Start and Stop numbers | | | |
| | refer to the sequences in | | | |
| | Table III.1 | | | |
| Akkermansia muciniphila ATCC BAA-835 | 871 | 1101 | 231 | ALK |
| Ralstonia syzygii R24 | 821 | 1062 | 242 | APY |
| Cand. Puniceispirillum marinum IMCC1322 | 815 | 1035 | 221 | AYK |
| Fructobacillus fructosus KCTC 3544 | 1074 | 1323 | 250 | DGN |
| Eubacterium yurii ATCC 43715 | 1107 | 1391 | 285 | DGY |
| Eubacterium dolichum DSM 3991 | 779 | 1096 | 318 | DKK |
| Dinoroseobacter shibae DFL 12 | 851 | 1079 | 229 | DPI |
| Clostridium cellulolyticum H10 | 767 | 1021 | 255 | EGK |
| Pasteurella multocida str. Pm70 | 815 | 1056 | 242 | ENN |
| Mycoplasma canis PG 14 | 907 | 1233 | 327 | EPK |
| Porphyromonas sp. oral taxon 279 str. F0450 | 935 | 1197 | 263 | EPT |
| Filifactor alocis ATCC 35896 | 1094 | 1365 | 272 | EVD |
| Aminomonas paucivorans DSM 12260 | 801 | 1052 | 252 | EVY |
| Wolinella succinogenes DSM 1740 | 1034 | 1409 | 376 | EYK |
| Oenococcus kitaharae DSM 17330 | 1119 | 1389 | 271 | GAL |
| CoriobacteriumglomeransPW2 | 1126 | 1384 | 259 | GDR |
| Peptoniphilus duerdenii ATCC BAA-1640 | 1091 | 1364 | 274 | GDS |
| Bifidobacterium bifidum S17 | 1138 | 1420 | 283 | GGL |
| Alicyclobacillus hesperidum URH17-3-68 | 876 | 1146 | 271 | GGR |
| Roseburia inulinivorans DSM 16841 | 895 | 1152 | 258 | GGT |
| Actinomyces coleocanis DSM 15436 | 843 | 1105 | 263 | GKK |
| Odoribacter laneus YIT 12061 | 1103 | 1498 | 396 | GKV |
| Coprococcus catus GD-7 | 1063 | 1338 | 276 | GNQ |
| Enterococcus faecalis TX0012 | 829 | 1150 | 322 | GRK |
| Bacillus smithii 7 3 47FAA | 809 | 1088 | 280 | GSK |
| Legionella pneumophila str. Paris | 1021 | 1372 | 352 | GTM |
| Bacteroides fragilis NCTC 9343 | 1140 | 1436 | 297 | IPV |
| Mycoplasma ovipneumoniae SC01 | 923 | 1265 | 343 | IRI |
| Actinomyces sp. oral taxon 180 str. F0310 | 895 | 1181 | 287 | KEK |
| Treponema sp. JC4 | 832 | 1062 | 231 | KIS |
| Fusobacteriumnucleatum ATCC49256 | 1073 | 1374 | 302 | KKV |
| Lactobacillus farciminis KCTC 3681 | 1101 | 1356 | 256 | KKV |
| Nitratifractor salsuginis DSM 16511 | 840 | 1132 | 293 | KMR |
| Lactobacillus coryniformis KCTC 3535 | 850 | 1119 | 270 | KNK |
| Mycoplasma mobile 163K | 916 | 1236 | 321 | KNY |
| Flavobacterium branchiophilum FL-15 | 1182 | 1473 | 292 | KQK |
| Prevotella timonensis CRIS 5C-B1 | 957 | 1218 | 262 | KQQ |
| Methylosinus trichosporium OB3b | 830 | 1082 | 253 | KRP |
| Prevotella sp. C561 | 1099 | 1424 | 326 | KRY |
| Mycoplasma gallisepticum str. F | 911 | 1269 | 359 | KTA |
| Lactobacillus rhamnosus GG | 1077 | 1363 | 287 | KYG |
| Wolinella succinogenes DSM 1740 | 811 | 1059 | 249 | LPN |
| Streptococcus thermophilus LMD-9 | 1099 | 1388 | 290 | MLA |
| Treponema denticola ATCC 35405 | 1092 | 1395 | 304 | NDS |
| Bergeyella zoohelcum ATCC 43767 | 1098 | 1415 | 318 | NEK |
| Veillonella atypica ACS-134-V-Col7a | 1107 | 1398 | 292 | NGF |
| Neisseria meningitidis Z2491 | 835 | 1082 | 248 | NHN |
| Ignavibacterium album JCM 16511 | 1296 | 1688 | 393 | NKK |
| Ruminococcus albus 8 | 853 | 1156 | 304 | NNF |
| Streptococcus thermophilus LMD-9 | 811 | 1121 | 311 | NNK |
| Barnesiella intestinihominis YIT 11860 | 871 | 1153 | 283 | NPV |
| Azospirillum sp. B510 | 911 | 1168 | 258 | PFH |
| Rhodospirillum rubrum ATCC 11170 | 863 | 1173 | 311 | PRG |
| Planococcus antarcticus DSM 14505 | 1087 | 1333 | 247 | PYY |
| Staphylococcus pseudintermedius ED99 | 1073 | 1334 | 262 | QIV |
| Alcanivorax sp. W11-5 | 843 | 1113 | 271 | RIE |
| Bradyrhizobium sp. BTAi1 | 811 | 1064 | 254 | RIY |
| Streptococcus pyogenes M1 GAS | 1099 | 1368 | 270 | RKR |
| Streptococcus mutans UA159 | 1078 | 1345 | 268 | RKR |
| Streptococcus Pyogenes | 1099 | 1368 | 270 | RKR |
| Bacteroides sp. 20 3 | 1147 | 1517 | 371 | RNI |
| S. aureus | 772 | 1053 | 282 | RNK |
| Solobacterium moorei F0204 | 1062 | 1327 | 266 | RSG |
| Finegoldia magna ATCC 29328 | 1081 | 1348 | 268 | RTE |
| uncultured delta proteobacterium HF0070 07E19 | 770 | 1011 | 242 | SGG |
| Acidaminococcus sp. D21 | 1064 | 1358 | 295 | SIG |
| Eubacterium rectale ATCC 33656 | 824 | 1114 | 291 | SKK |
| Caenispirillum salinarum AK4 | 1048 | 1442 | 395 | SLV |
| Acidothermus cellulolyticus 11B | 830 | 1138 | 309 | SPS |
| Catenibacterium mitsuokai DSM 15897 | 1068 | 1329 | 262 | SPT |
| Parvibaculum lavamentivorans DS-1 | 827 | 1037 | 211 | TGN |
| Staphylococcus lugdunensis M23590 | 772 | 1054 | 283 | TKK |
| Streptococcus sanguinis SK49 | 1123 | 1421 | 299 | TRM |
| Elusimicrobium minutum Pei191 | 910 | 1195 | 286 | TTG |
| Nitrobacter hamburgensis X14 | 914 | 1166 | 253 | VAY |
| Mycoplasma synoviae 53 | 991 | 1314 | 324 | VGF |
| Sphaerochaeta globus str. Buddy | 877 | 1179 | 303 | VKG |
| Ilyobacter polytropus DSM 2926 | 837 | 1092 | 256 | VNG |
| Rhodovulum sp. PH10 | 821 | 1059 | 239 | VPY |
| Bifidobacterium longum DJO10A | 904 | 1187 | 284 | VRK |

[1094] Additional Cas9 molecules are discussed in the section entitled “II. Cas9 Molecules” in International Application WO2015/048577.

Nucleic Acids Encoding Cas9 Molecules Nucleic acids encoding the Cas9 molecules or Cas9 polypeptides, e.g., an eaCas9 molecule or eaCas9 polypeptides, are provided herein.

[1095] Exemplary nucleic acids encoding Cas9 molecules are described in Cong et al., SCIENCE 2013, 399(6121): 819-823; Wang et al., CELL 2013, 153(4): 910-918; Mali et al., SCIENCE 2013, 399(6121): 823-826; Jinek et al., SCIENCE 2012, 337(6096): 816-821.

[1096] In an embodiment, a nucleic acid encoding a Cas9 molecule, or Cas9 polypeptide, can be a synthetic nucleic acid sequence. For example, the synthetic nucleic acid molecule can be chemically modified, e.g., as described in Section X. In an embodiment, the mRNA, e.g., coding for a Cas9 molecule, or Cas9 polypeptide, disclosed herein, has one or more, e.g., all, of the following properties: it is capped, polyadenylated, substituted with 5-methylcytidine and/or pseudouridine.

[1097] In addition, or alternatively, the synthetic nucleic acid sequence can be codon optimized, e.g., at least one non-common codon or less-common codon has been replaced by a codon that is common in the host cell. For example, the synthetic nucleic acid can direct the synthesis of an optimized messenger mRNA, e.g., optimized for expression in a mammalian expression system, e.g., described herein.

[1098] In addition, or alternatively, a nucleic acid encoding a Cas9 molecule, or a Cas9 polypeptide, may comprise a nuclear localization sequence (NLS). Nuclear localization sequences are known in the art.

[1099] Provided below is an exemplary codon optimized nucleic acid sequence encoding a Cas9 molecule of S. pyogenes.

(SEQ ID NO: 129)
ATGGATAAAAAGTACAGCATCGGGCTGGACATCGGTACAAACTCAGTGGG
GTGGGCCGTGATTACGGACGAGTACAAGGTACCCTCCAAAAAATTTAAAG
TGCTGGGTAACACGGACAGACACTCTATAAAGAAAAATCTTATTGGAGCC
TTGCTGTTCGACTCAGGCGAGACAGCCGAAGCCACAAGGTTGAAGCGGAC
CGCCAGGAGGCGGTATACCAGGAGAAAGAACCGCATATGCTACCTGCAAG
AAATCTTCAGTAACGAGATGGCAAAGGTTGACGATAGCTTTTTCCATCGC
CTGGAAGAATCCTTTCTTGTTGAGGAAGACAAGAAGCACGAACGGCACCC
CATCTTTGGCAATATTGTCGACGAAGTGGCATATCACGAAAAGTACCCGA
CTATCTACCACCTCAGGAAGAAGCTGGTGGACTCTACCGATAAGGCGGAC
CTCAGACTTATTTATTTGGCACTCGCCCACATGATTAAATTTAGAGGACA
TTTCTTGATCGAGGGCGACCTGAACCCGGACAACAGTGACGTCGATAAGC
TGTTCATCCAACTTGTGCAGACCTACAATCAACTGTTCGAAGAAAACCCT
ATAAATGCTTCAGGAGTCGACGCTAAAGCAATCCTGTCCGCGCGCCTCTC
AAAATCTAGAAGACTTGAGAATCTGATTGCTCAGTTGCCCGGGGAAAAGA
AAAATGGATTGTTTGGCAACCTGATCGCCCTCAGTCTCGGACTGACCCCA
AATTTCAAAAGTAACTTCGACCTGGCCGAAGACGCTAAGCTCCAGCTGTC
CAAGGACACATACGATGACGACCTCGACAATCTGCTGGCCCAGATTGGGG
ATCAGTACGCCGATCTCTTTTTGGCAGCAAAGAACCTGTCCGACGCCATC
CTGTTGAGCGATATCTTGAGAGTGAACACCGAAATTACTAAAGCACCCCT
TAGCGCATCTATGATCAAGCGGTACGACGAGCATCATCAGGATCTGACCC
TGCTGAAGGCTCTTGTGAGGCAACAGCTCCCCGAAAAATACAAGGAAATC
TTCTTTGACCAGAGCAAAAACGGCTACGCTGGCTATATAGATGGTGGGGC
CAGTCAGGAGGAATTCTATAAATTCATCAAGCCCATTCTCGAGAAAATGG
ACGGCACAGAGGAGTTGCTGGTCAAACTTAACAGGGAGGACCTGCTGCGG
AAGCAGCGGACCTTTGACAACGGGTCTATCCCCCACCAGATTCATCTGGG
CGAACTGCACGCAATCCTGAGGAGGCAGGAGGATTTTTATCCTTTTCTTA
AAGATAACCGCGAGAAAATAGAAAAGATTCTTACATTCAGGATCCCGTAC
TACGTGGGACCTCTCGCCCGGGGCAATTCACGGTTTGCCTGGATGACAAG
GAAGTCAGAGGAGACTATTACACCTTGGAACTTCGAAGAAGTGGTGGACA
AGGGTGCATCTGCCCAGTCTTTCATCGAGCGGATGACAAATTTTGACAAG
AACCTCCCTAATGAGAAGGTGCTGCCCAAACATTCTCTGCTCTACGAGTA
CTTTACCGTCTACAATGAACTGACTAAAGTCAAGTACGTCACCGAGGGAA
TGAGGAAGCCGGCATTCCTTAGTGGAGAACAGAAGAAGGCGATTGTAGAC
CTGTTGTTCAAGACCAACAGGAAGGTGACTGTGAAGCAACTTAAAGAAGA
CTACTTTAAGAAGATCGAATGTTTTGACAGTGTGGAAATTTCAGGGGTTG
AAGACCGCTTCAATGCGTCATTGGGGACTTACCATGATCTTCTCAAGATC
ATAAAGGACAAAGACTTCCTGGACAACGAAGAAAATGAGGATATTCTCGA
AGACATCGTCCTCACCCTGACCCTGTTCGAAGACAGGGAAATGATAGAAG
AGCGCTTGAAAACCTATGCCCACCTCTTCGACGATAAAGTTATGAAGCAG
CTGAAGCGCAGGAGATACACAGGATGGGGAAGATTGTCAAGGAAGCTGAT
CAATGGAATTAGGGATAAACAGAGTGGCAAGACCATACTGGATTTCCTCA
AATCTGATGGCTTCGCCAATAGGAACTTCATGCAACTGATTCACGATGAC
TCTCTTACCTTCAAGGAGGACATTCAAAAGGCTCAGGTGAGCGGGCAGGG
AGACTCCCTTCATGAACACATCGCGAATTTGGCAGGTTCCCCCGCTATTA
AAAAGGGCATCCTTCAAACTGTCAAGGTGGTGGATGAATTGGTCAAGGTA
ATGGGCAGACATAAGCCAGAAAATATTGTGATCGAGATGGCCCGCGAAAA
CCAGACCACACAGAAGGGCCAGAAAAATAGTAGAGAGCGGATGAAGAGGA
TCGAGGAGGGCATCAAAGAGCTGGGATCTCAGATTCTCAAAGAACACCCC
GTAGAAAACACACAGCTGCAGAACGAAAAATTGTACTTGTACTATCTGCA
GAACGGCAGAGACATGTACGTCGACCAAGAACTTGATATTAATAGACTGT
CCGACTATGACGTAGACCATATCGTGCCCCAGTCCTTCCTGAAGGACGAC
TCCATTGATAACAAAGTCTTGACAAGAAGCGACAAGAACAGGGGTAAAAG
TGATAATGTGCCTAGCGAGGAGGTGGTGAAAAAAATGAAGAACTACTGGC
GACAGCTGCTTAATGCAAAGCTCATTACACAACGGAAGTTCGATAATCTG
ACGAAAGCAGAGAGAGGTGGCTTGTCTGAGTTGGACAAGGCAGGGTTTAT
TAAGCGGCAGCTGGTGGAAACTAGGCAGATCACAAAGCACGTGGCGCAGA
TTTTGGACAGCCGGATGAACACAAAATACGACGAAAATGATAAACTGATA
CGAGAGGTCAAAGTTATCACGCTGAAAAGCAAGCTGGTGTCCGATTTTCG
GAAAGACTTCCAGTTCTACAAAGTTCGCGAGATTAATAACTACCATCATG
CTCACGATGCGTACCTGAACGCTGTTGTCGGGACCGCCTTGATAAAGAAG
TACCCAAAGCTGGAATCCGAGTTCGTATACGGGGATTACAAAGTGTACGA
TGTGAGGAAAATGATAGCCAAGTCCGAGCAGGAGATTGGAAAGGCCACAG
CTAAGTACTTCTTTTATTCTAACATCATGAATTTTTTTAAGACGGAAATT
ACCCTGGCCAACGGAGAGATCAGAAAGCGGCCCCTTATAGAGACAAATGG
TGAAACAGGTGAAATCGTCTGGGATAAGGGCAGGGATTTCGCTACTGTGA
GGAAGGTGCTGAGTATGCCACAGGTAAATATCGTGAAAAAAACCGAAGTA
CAGACCGGAGGATTTTCCAAGGAAAGCATTTTGCCTAAAAGAAACTCAGA
CAAGCTCATCGCCCGCAAGAAAGATTGGGACCCTAAGAAATACGGGGGAT
TTGACTCACCCACCGTAGCCTATTCTGTGCTGGTGGTAGCTAAGGTGGAA
AAAGGAAAGTCTAAGAAGCTGAAGTCCGTGAAGGAACTCTTGGGAATCAC
TATCATGGAAAGATCATCCTTTGAAAAGAACCCTATCGATTTCCTGGAGG
CTAAGGGTTACAAGGAGGTCAAGAAAGACCTCATCATTAAACTGCCAAAA
TACTCTCTCTTCGAGCTGGAAAATGGCAGGAAGAGAATGTTGGCCAGCGC
CGGAGAGCTGCAAAAGGGAAACGAGCTTGCTCTGCCCTCCAAATATGTTA
ATTTTCTCTATCTCGCTTCCCACTATGAAAAGCTGAAAGGGTCTCCCGAA
GATAACGAGCAGAAGCAGCTGTTCGTCGAACAGCACAAGCACTATCTGGA
TGAAATAATCGAACAAATAAGCGAGTTCAGCAAAAGGGTTATCCTGGCGG
ATGCTAATTTGGACAAAGTACTGTCTGCTTATAACAAGCACCGGGATAAG
CCTATTAGGGAACAAGCCGAGAATATAATTCACCTCTTTACACTCACGAA
TCTCGGAGCCCCCGCCGCCTTCAAATACTTTGATACGACTATCGACCGGA
AACGGTATACCAGTACCAAAGAGGTCCTCGATGCCACCCTCATCCACCAG
TCAATTACTGGCCTGTACGAAACACGGATCGACCTCTCTCAACTGGGCGG
CGACTAG

[1100] Provided below is the corresponding amino acid sequence of a S. pyogenes Cas9 molecule.

(SEQ ID NO: 130)
[sequence omitted]

[1101] Provided below is an exemplary codon optimized nucleic acid sequence encoding a Cas9 molecule of N. meningitidis.

(SEQ ID NO: 131)
ATGGCCGCCTTCAAGCCCAACCCCATCAACTACATCCTGGGCCTGGACAT
CGGCATCGCCAGCGTGGGCTGGGCCATGGTGGAGATCGACGAGGACGAGA
ACCCCATCTGCCTGATCGACCTGGGTGTGCGCGTGTTCGAGCGCGCTGAG
GTGCCCAAGACTGGTGACAGTCTGGCTATGGCTCGCCGGCTTGCTCGCTC
TGTTCGGCGCCTTACTCGCCGGCGCGCTCACCGCCTTCTGCGCGCTCGCC
GCCTGCTGAAGCGCGAGGGTGTGCTGCAGGCTGCCGACTTCGACGAGAAC
GGCCTGATCAAGAGCCTGCCCAACACTCCTTGGCAGCTGCGCGCTGCCGC
TCTGGACCGCAAGCTGACTCCTCTGGAGTGGAGCGCCGTGCTGCTGCACC
TGATCAAGCACCGCGGCTACCTGAGCCAGCGCAAGAACGAGGGCGAGACC
GCCGACAAGGAGCTGGGTGCTCTGCTGAAGGGCGTGGCCGACAACGCCCA
CGCCCTGCAGACTGGTGACTTCCGCACTCCTGCTGAGCTGGCCCTGAACA
AGTTCGAGAAGGAGAGCGGCCACATCCGCAACCAGCGCGGCGACTACAGC
CACACCTTCAGCCGCAAGGACCTGCAGGCCGAGCTGATCCTGCTGTTCGA
GAAGCAGAAGGAGTTCGGCAACCCCCACGTGAGCGGCGGCCTGAAGGAGG
GCATCGAGACCCTGCTGATGACCCAGCGCCCCGCCCTGAGCGGCGACGCC
GTGCAGAAGATGCTGGGCCACTGCACCTTCGAGCCAGCCGAGCCCAAGGC
CGCCAAGAACACCTACACCGCCGAGCGCTTCATCTGGCTGACCAAGCTGA
ACAACCTGCGCATCCTGGAGCAGGGCAGCGAGCGCCCCCTGACCGACACC
GAGCGCGCCACCCTGATGGACGAGCCCTACCGCAAGAGCAAGCTGACCTA
CGCCCAGGCCCGCAAGCTGCTGGGTCTGGAGGACACCGCCTTCTTCAAGG
GCCTGCGCTACGGCAAGGACAACGCCGAGGCCAGCACCCTGATGGAGATG
AAGGCCTACCACGCCATCAGCCGCGCCCTGGAGAAGGAGGGCCTGAAGGA
CAAGAAGAGTCCTCTGAACCTGAGCCCCGAGCTGCAGGACGAGATCGGCA
CCGCCTTCAGCCTGTTCAAGACCGACGAGGACATCACCGGCCGCCTGAAG
GACCGCATCCAGCCCGAGATCCTGGAGGCCCTGCTGAAGCACATCAGCTT
CGACAAGTTCGTGCAGATCAGCCTGAAGGCCCTGCGCCGCATCGTGCCCC
TGATGGAGCAGGGCAAGCGCTACGACGAGGCCTGCGCCGAGATCTACGGC
GACCACTACGGCAAGAAGAACACCGAGGAGAAGATCTACCTGCCTCCTAT
CCCCGCCGACGAGATCCGCAACCCCGTGGTGCTGCGCGCCCTGAGCCAGG
CCCGCAAGGTGATCAACGGCGTGGTGCGCCGCTACGGCAGCCCCGCCCGC
ATCCACATCGAGACCGCCCGCGAGGTGGGCAAGAGCTTCAAGGACCGCAA
GGAGATCGAGAAGCGCCAGGAGGAGAACCGCAAGGACCGCGAGAAGGCCG
CCGCCAAGTTCCGCGAGTACTTCCCCAACTTCGTGGGCGAGCCCAAGAGC
AAGGACATCCTGAAGCTGCGCCTGTACGAGCAGCAGCACGGCAAGTGCCT
GTACAGCGGCAAGGAGATCAACCTGGGCCGCCTGAACGAGAAGGGCTACG
TGGAGATCGACCACGCCCTGCCCTTCAGCCGCACCTGGGACGACAGCTTC
AACAACAAGGTGCTGGTGCTGGGCAGCGAGAACCAGAACAAGGGCAACCA
GACCCCCTACGAGTACTTCAACGGCAAGGACAACAGCCGCGAGTGGCAGG
AGTTCAAGGCCCGCGTGGAGACCAGCCGCTTCCCCCGCAGCAAGAAGCAG
CGCATCCTGCTGCAGAAGTTCGACGAGGACGGCTTCAAGGAGCGCAACCT
GAACGACACCCGCTACGTGAACCGCTTCCTGTGCCAGTTCGTGGCCGACC
GCATGCGCCTGACCGGCAAGGGCAAGAAGCGCGTGTTCGCCAGCAACGGC
CAGATCACCAACCTGCTGCGCGGCTTCTGGGGCCTGCGCAAGGTGCGCGC
CGAGAACGACCGCCACCACGCCCTGGACGCCGTGGTGGTGGCCTGCAGCA
CCGTGGCCATGCAGCAGAAGATCACCCGCTTCGTGCGCTACAAGGAGATG
AACGCCTTCGACGGTAAAACCATCGACAAGGAGACCGGCGAGGTGCTGCA
CCAGAAGACCCACTTCCCCCAGCCCTGGGAGTTCTTCGCCCAGGAGGTGA
TGATCCGCGTGTTCGGCAAGCCCGACGGCAAGCCCGAGTTCGAGGAGGCC
GACACCCCCGAGAAGCTGCGCACCCTGCTGGCCGAGAAGCTGAGCAGCCG
CCCTGAGGCCGTGCACGAGTACGTGACTCCTCTGTTCGTGAGCCGCGCCC
CCAACCGCAAGATGAGCGGTCAGGGTCACATGGAGACCGTGAAGAGCGCC
AAGCGCCTGGACGAGGGCGTGAGCGTGCTGCGCGTGCCCCTGACCCAGCT
GAAGCTGAAGGACCTGGAGAAGATGGTGAACCGCGAGCGCGAGCCCAAGC
TGTACGAGGCCCTGAAGGCCCGCCTGGAGGCCCACAAGGACGACCCCGCC
AAGGCCTTCGCCGAGCCCTTCTACAAGTACGACAAGGCCGGCAACCGCAC
CCAGCAGGTGAAGGCCGTGCGCGTGGAGCAGGTGCAGAAGACCGGCGTGT
GGGTGCGCAACCACAACGGCATCGCCGACAACGCCACCATGGTGCGCGTG
GACGTGTTCGAGAAGGGCGACAAGTACTACCTGGTGCCCATCTACAGCTG
GCAGGTGGCCAAGGGCATCCTGCCCGACCGCGCCGTGGTGCAGGGCAAGG
ACGAGGAGGACTGGCAGCTGATCGACGACAGCTTCAACTTCAAGTTCAGC
CTGCACCCCAACGACCTGGTGGAGGTGATCACCAAGAAGGCCCGCATGTT
CGGCTACTTCGCCAGCTGCCACCGCGGCACCGGCAACATCAACATCCGCA
TCCACGACCTGGACCACAAGATCGGCAAGAACGGCATCCTGGAGGGCATC
GGCGTGAAGACCGCCCTGAGCTTCCAGAAGTACCAGATCGACGAGCTGGG
CAAGGAGATCCGCCCCTGCCGCCTGAAGAAGCGCCCTCCTGTGCGCTAA

[1102] Provided below is the corresponding amino acid sequence of a N. meningitidis Cas9 molecule.

(SEQ ID NO: 132)
MAAFKPNPINYILGLDIGIASVGWAMVEIDEDENPICLIDLGVRVFERAE
VPKTGDSLAMARRLARSVRRLTRRRAHRLLRARRLLKREGVLQAADFDEN
GLIKSLPNTPWQLRAAALDRKLTPLEWSAVLLHLIKHRGYLSQRKNEGET
ADKELGALLKGVADNAHALQTGDFRTPAELALNKFEKESGHIRNQRGDYS
HTFSRKDLQAELILLFEKQKEFGNPHVSGGLKEGIETLLMTQRPALSGDA
VQKMLGHCTFEPAEPKAAKNTYTAERFIWLTKLNNLRILEQGSERPLTDT
ERATLMDEPYRKSKLTYAQARKLLGLEDTAFFKGLRYGKDNAEASTLMEM
KAYHAISRALEKEGLKDKKSPLNLSPELQDEIGTAFSLFKTDEDITGRLK
DRIQPEILEALLKHISFDKFVQISLKALRRIVPLMEQGKRYDEACAEIYG
DHYGKKNTEEKIYLPPIPADEIRNPVVLRALSQARKVINGVVRRYGSPAR
IHIETAREVGKSFKDRKEIEKRQEENRKDREKAAAKFREYFPNFVGEPKS
KDILKLRLYEQQHGKCLYSGKEINLGRLNEKGYVEIDHALPFSRTWDDSF
NNKVLVLGSENQNKGNQTPYEYFNGKDNSREWQEFKARVETSRFPRSKKQ
RILLQKFDEDGFKERNLNDTRYVNRFLCQFVADRMRLTGKGKKRVFASNG
QITNLLRGFWGLRKVRAENDRHHALDAVVVACSTVAMQQKITRFVRYKEM
NAFDGKTIDKETGEVLHQKTHFPQPWEFFAQEVMIRVFGKPDGKPEFEEA
DTPEKLRTLLAEKLSSRPEAVHEYVTPLFVSRAPNRKMSGQGHMETVKSA
KRLDEGVSVLRVPLTQLKLKDLEKMVNREREPKLYEALKARLEAHKDDPA
KAFAEPFYKYDKAGNRTQQVKAVRVEQVQKTGVWVRNHNGIADNATMVRV
DVFEKGDKYYLVPIYSWQVAKGILPDRAVVQGKDEEDWQLIDDSFNFKFS
LHPNDLVEVITKKARMFGYFASCHRGTGNINIRIHDLDHKIGKNGILEGI
GVKTALSFQKYQIDELGKEIRPCRLKKRPPVR*

[1103] Provided below is an amino acid sequence of a S. aureus Cas9 molecule.

(SEQ ID NO: 133)
MKRNYILGLDIGITSVGYGIIDYETRDVIDAGVRLFKEANVENNEGRRSK
RGARRLKRRRRHRIQRVKKLLFDYNLLTDHSELSGINPYEARVKGLSQKL
SEEEFSAALLHLAKRRGVHNVNEVEEDTGNELSTKEQISRNSKALEEKYV
AELQLERLKKDGEVRGSINRFKTSDYVKEAKQLLKVQKAYHQLDQSFIDT
YIDLLETRRTYYEGPGEGSPFGWKDIKEWYEMLMGHCTYFPEELRSVKYA
YNADLYNALNDLNNLVITRDENEKLEYYEKFQIIENVFKQKKKPTLKQIA
KEILVNEEDIKGYRVTSTGKPEFTNLKVYHDIKDITARKEIIENAELLDQ
IAKILTIYQSSEDIQEELTNLNSELTQEEIEQISNLKGYTGTHNLSLKAI
NLILDELWHTNDNQIAIFNRLKLVPKKVDLSQQKEIPTTLVDDFILSPVV
KRSFIQSIKVINAIIKKYGLPNDIIIELAREKNSKDAQKMINEMQKRNRQ
TNERIEEIIRTTGKENAKYLIEKIKLHDMQEGKCLYSLEAIPLEDLLNNP
FNYEVDHIIPRSVSFDNSFNNKVLVKQEENSKKGNRTPFQYLSSSDSKIS
YETFKKHILNLAKGKGRISKTKKEYLLEERDINRFSVQKDFINRNLVDTR
YATRGLMNLLRSYFRVNNLDVKVKSINGGFTSFLRRKWKFKKERNKGYKH
HAEDALIIANADFIFKEWKKLDKAKKVMENQMFEEKQAESMPEIETEQEY
KEIFITPHQIKHIKDFKDYKYSHRVDKKPNRELINDTLYSTRKDDKGNTL
IVNNLNGLYDKDNDKLKKLINKSPEKLLMYHHDPQTYQKLKLIMEQYGDE
KNPLYKYYEETGNYLTKYSKKDNGPVIKKIKYYGNKLNAHLDITDDYPNS
RNKVVKLSLKPYRFDVYLDNGVYKFVTVKNLDVIKKENYYEVNSKCYEEA
KKLKKISNQAEFIASFYNNDLIKINGELYRVIGVNNDLLNRIEVNMIDIT
YREYLENMNDKRPPRIIKTIASKTQSIKKYSTDILGNLYEVKSKKHPQII
KKG*

[1104] Provided below is an exemplary codon optimized nucleic acid sequence encoding a S. aureus Cas9 molecule.

(SEQ ID NO: 134)
ATGAAAAGGAACTACATTCTGGGGCTGGACATCGGGATTACAAGCGTGGG
GTATGGGATTATTGACTATGAAACAAGGGACGTGATCGACGCAGGCGTCA
GACTGTTCAAGGAGGCCAACGTGGAAAACAATGAGGGACGGAGAAGCAAG
AGGGGAGCCAGGCGCCTGAAACGACGGAGAAGGCACAGAATCCAGAGGGT
GAAGAAACTGCTGTTCGATTACAACCTGCTGACCGACCATTCTGAGCTGA
GTGGAATTAATCCTTATGAAGCCAGGGTGAAAGGCCTGAGTCAGAAGCTG
TCAGAGGAAGAGTTTTCCGCAGCTCTGCTGCACCTGGCTAAGCGCCGAGG
AGTGCATAACGTCAATGAGGTGGAAGAGGACACCGGCAACGAGCTGTCTA
CAAAGGAACAGATCTCACGCAATAGCAAAGCTCTGGAAGAGAAGTATGTC
GCAGAGCTGCAGCTGGAACGGCTGAAGAAAGATGGCGAGGTGAGAGGGTC
AATTAATAGGTTCAAGACAAGCGACTACGTCAAAGAAGCCAAGCAGCTGC
TGAAAGTGCAGAAGGCTTACCACCAGCTGGATCAGAGCTTCATCGATACT
TATATCGACCTGCTGGAGACTCGGAGAACCTACTATGAGGGACCAGGAGA
AGGGAGCCCCTTCGGATGGAAAGACATCAAGGAATGGTACGAGATGCTGA
TGGGACATTGCACCTATTTTCCAGAAGAGCTGAGAAGCGTCAAGTACGCT
TATAACGCAGATCTGTACAACGCCCTGAATGACCTGAACAACCTGGTCAT
CACCAGGGATGAAAACGAGAAACTGGAATACTATGAGAAGTTCCAGATCA
TCGAAAACGTGTTTAAGCAGAAGAAAAAGCCTACACTGAAACAGATTGCT
AAGGAGATCCTGGTCAACGAAGAGGACATCAAGGGCTACCGGGTGACAAG
CACTGGAAAACCAGAGTTCACCAATCTGAAAGTGTATCACGATATTAAGG
ACATCACAGCACGGAAAGAAATCATTGAGAACGCCGAACTGCTGGATCAG
ATTGCTAAGATCCTGACTATCTACCAGAGCTCCGAGGACATCCAGGAAGA
GCTGACTAACCTGAACAGCGAGCTGACCCAGGAAGAGATCGAACAGATTA
GTAATCTGAAGGGGTACACCGGAACACACAACCTGTCCCTGAAAGCTATC
AATCTGATTCTGGATGAGCTGTGGCATACAAACGACAATCAGATTGCAAT
CTTTAACCGGCTGAAGCTGGTCCCAAAAAAGGTGGACCTGAGTCAGCAGA
AAGAGATCCCAACCACACTGGTGGACGATTTCATTCTGTCACCCGTGGTC
AAGCGGAGCTTCATCCAGAGCATCAAAGTGATCAACGCCATCATCAAGAA
GTACGGCCTGCCCAATGATATCATTATCGAGCTGGCTAGGGAGAAGAACA
GCAAGGACGCACAGAAGATGATCAATGAGATGCAGAAACGAAACCGGCAG
ACCAATGAACGCATTGAAGAGATTATCCGAACTACCGGGAAAGAGAACGC
AAAGTACCTGATTGAAAAAATCAAGCTGCACGATATGCAGGAGGGAAAGT
GTCTGTATTCTCTGGAGGCCATCCCCCTGGAGGACCTGCTGAACAATCCA
TTCAACTACGAGGTCGATCATATTATCCCCAGAAGCGTGTCCTTCGACAA
TTCCTTTAACAACAAGGTGCTGGTCAAGCAGGAAGAGAACTCTAAAAAGG
GCAATAGGACTCCTTTCCAGTACCTGTCTAGTTCAGATTCCAAGATCTCT
TACGAAACCTTTAAAAAGCACATTCTGAATCTGGCCAAAGGAAAGGGCCG
CATCAGCAAGACCAAAAAGGAGTACCTGCTGGAAGAGCGGGACATCAACA
GATTCTCCGTCCAGAAGGATTTTATTAACCGGAATCTGGTGGACACAAGA
TACGCTACTCGCGGCCTGATGAATCTGCTGCGATCCTATTTCCGGGTGAA
CAATCTGGATGTGAAAGTCAAGTCCATCAACGGCGGGTTCACATCTTTTC
TGAGGCGCAAATGGAAGTTTAAAAAGGAGCGCAACAAAGGGTACAAGCAC
CATGCCGAAGATGCTCTGATTATCGCAAATGCCGACTTCATCTTTAAGGA
GTGGAAAAAGCTGGACAAAGCCAAGAAAGTGATGGAGAACCAGATGTTCG
AAGAGAAGCAGGCCGAATCTATGCCCGAAATCGAGACAGAACAGGAGTAC
AAGGAGATTTTCATCACTCCTCACCAGATCAAGCATATCAAGGATTTCAA
GGACTACAAGTACTCTCACCGGGTGGATAAAAAGCCCAACAGAGAGCTGA
TCAATGACACCCTGTATAGTACAAGAAAAGACGATAAGGGGAATACCCTG
ATTGTGAACAATCTGAACGGACTGTACGACAAAGATAATGACAAGCTGAA
AAAGCTGATCAACAAAAGTCCCGAGAAGCTGCTGATGTACCACCATGATC
CTCAGACATATCAGAAACTGAAGCTGATTATGGAGCAGTACGGCGACGAG
AAGAACCCACTGTATAAGTACTATGAAGAGACTGGGAACTACCTGACCAA
GTATAGCAAAAAGGATAATGGCCCCGTGATCAAGAAGATCAAGTACTATG
GGAACAAGCTGAATGCCCATCTGGACATCACAGACGATTACCCTAACAGT
CGCAACAAGGTGGTCAAGCTGTCACTGAAGCCATACAGATTCGATGTCTA
TCTGGACAACGGCGTGTATAAATTTGTGACTGTCAAGAATCTGGATGTCA
TCAAAAAGGAGAACTACTATGAAGTGAATAGCAAGTGCTACGAAGAGGCT
AAAAAGCTGAAAAAGATTAGCAACCAGGCAGAGTTCATCGCCTCCTTTTA
CAACAACGACCTGATTAAGATCAATGGCGAACTGTATAGGGTCATCGGGG
TGAACAATGATCTGCTGAACCGCATTGAAGTGAATATGATTGACATCACT
TACCGAGAGTATCTGGAAAACATGAATGATAAGCGCCCCCCTCGAATTAT
CAAAACAATTGCCTCTAAGACTCAGAGTATCAAAAAGTACTCAACCGACA
TTCTGGGAAACCTGTATGAGGTGAAGAGCAAAAAGCACCCTCAGATTATC
AAAAAGGGC

[1105] If any of the above Cas9 sequences are fused with a peptide or polypeptide at the C-terminus, it is understood that the stop codon will be removed.

### Other Cas Molecules and Cas Polypeptides

[1106] Various types of Cas molecules or Cas polypeptides can be used to practice the inventions disclosed herein. In some embodiments, Cas molecules of Type II Cas systems are used. In other embodiments, Cas molecules of other Cas systems are used. For example, Type I or Type III Cas molecules may be used. Exemplary Cas molecules (and Cas systems) are described, e.g., in Haft et al. (2005) PLOS COMPUTATIONAL BIOLOGY 1(6): e60, and in Makarova et al. (2011) NATURE REVIEW MICROBIOLOGY 9: 467-477, the contents of which are incorporated herein by reference in their entirety. Exemplary Cas molecules (and Cas systems) are also shown in Table III.6.

TABLE III.6
Cas Systems

| | | | | Families | |
|---|---|---|---|---|---|
| | | | Structure of | (and superfamily) | |
| Gene | System type | Name from | encoded protein | of encoded | |
| name‡ | or subtype | Haft et al.§ | (PDB accessions)¶ | protein#** | Representatives |
| cas1 | Type I | cas1 | 3GOD, 3LFX and | COG1518 | SERP2463, SPy1047 |
| | Type II | | 2YZS | | and ygbT |
| | Type III | | | | |
| cas2 | Type I | cas2 | 2IVY, 2I8E and | COG1343 and | SERP2462, SPy1048, |
| | Type II | | 3EXC | COG3512 | SPy1723 (N-terminal |
| | Type III | | | | domain) and ygbF |
| cas3′ | Type I‡‡ | cas3 | NA | COG1203 | APE1232 and ygcB |
| cas3″ | Subtype I-A | NA | NA | COG2254 | APE1231 and |
| | Subtype I-B | | | | BH0336 |
| cas4 | Subtype I-A | cas4 and csa1 | NA | COG1468 | APE1239 and |
| | Subtype I-B | | | | BH0340 |
| | Subtype I-C | | | | |
| | Subtype I-D | | | | |
| | Subtype II-B | | | | |
| cas5 | Subtype I-A | cas5a, cas5d, | 3KG4 | COG1688 | APE1234, BH0337, |
| | Subtype I-B | cas5e, cas5h, | | (RAMP) | devS and ygcI |
| | Subtype I-C | cas5p, cas5t | | | |
| | Subtype I-E | and cmx5 | | | |
| cas6 | Subtype I-A | cas6 and cmx6 | 3I4H | COG1583 and | PF1131 and slr7014 |
| | Subtype I-B | | | COG5551 | |
| | Subtype I-D | | | (RAMP) | |
| | Subtype III-A | | | | |
| | Subtype III-B | | | | |
| cas6e | Subtype I-E | cse3 | 1WJ9 | (RAMP) | ygcH |
| cas6f | Subtype I-F | csy4 | 2XLJ | (RAMP) | y1727 |
| cas7 | Subtype I-A | csa2, csd2, | NA | COG1857 and | devR and ygcJ |
| | Subtype I-B | cse4, csh2, | | COG3649 | |
| | Subtype I-C | csp1 and cst2 | | (RAMP) | |
| | Subtype I-E | | | | |
| cas8a1 | Subtype I-A‡‡ | cmx1, cst1, | NA | BH0338-like | LA3191§§ and |
| | | csx8, csx13 | | | PG2018§§ |
| | | and CXXC- | | | |
| | | CXXC | | | |
| cas8a2 | Subtype I-A‡‡ | csa4 and csx9 | NA | PH0918 | AF0070, AF1873, |
| | | | | | MJ0385, PF0637, |
| | | | | | PH0918and |
| | | | | | SSO1401 |
| cas8b | Subtype I-B‡‡ | csh1 and | NA | BH0338-like | MTH1090 and |
| | | TM1802 | | | TM1802 |
| cas8c | Subtype I-C‡‡ | csd1 and csp2 | NA | BH0338-like | BH0338 |
| cas9 | Type II‡‡ | csn1 and csx12 | NA | COG3513 | FTN_0757 and |
| | | | | | SPy1046 |
| cas10 | Type III‡‡ | cmr2, csm1 | NA | COG1353 | MTH326, Rv2823c§§ |
| | | and csx11 | | | and TM1794§§ |
| cas10d | Subtype I-D‡‡ | csc3 | NA | COG1353 | slr7011 |
| csy1 | Subtype I-F‡‡ | csy1 | NA | y1724-like | y1724 |
| csy2 | Subtype I-F | csy2 | NA | (RAMP) | y1725 |
| csy3 | Subtype I-F | csy3 | NA | (RAMP) | y1726 |
| cse1 | Subtype I-E‡‡ | cse1 | NA | YgcL-like | ygcL |
| cse2 | Subtype I-E | cse2 | 2ZCA | YgcK-like | ygcK |
| csc1 | Subtype I-D | csc1 | NA | alr1563-like | alr1563 |
| | | | | (RAMP) | |
| csc2 | Subtype I-D | csc1 and csc2 | NA | COG1337 | slr7012 |
| | | | | (RAMP) | |
| csa5 | Subtype I-A | csa5 | NA | AF1870 | AF1870, MJ0380, |
| | | | | | PF0643 and SSO1398 |
| csn2 | Subtype II-A | csn2 | NA | SPy1049-like | SPy1049 |
| csm2 | Subtype III-A‡‡ | csm2 | NA | COG1421 | MTH1081 and |
| | | | | | SERP2460 |
| csm3 | Subtype III-A | csc2 and | NA | COG1337 | MTH1080 and |
| | | csm3 | | (RAMP) | SERP2459 |
| csm4 | Subtype III-A | csm4 | NA | COG1567 | MTH1079 and |
| | | | | (RAMP) | SERP2458 |
| csm5 | Subtype III-A | csm5 | NA | COG1332 | MTH1078 and |
| | | | | (RAMP) | SERP2457 |
| csm6 | Subtype III-A | APE2256 | 2WTE | COG1517 | APE2256 and |
| | | and csm6 | | | SSO1445 |
| cmr1 | Subtype III-B | cmr1 | NA | COG1367 | PF1130 |
| | | | | (RAMP) | |
| cmr3 | Subtype III-B | cmr3 | NA | COG1769 | PF1128 |
| | | | | (RAMP) | |
| cmr4 | Subtype III-B | cmr4 | NA | COG1336 | PF1126 |
| | | | | (RAMP) | |
| cmr5 | Subtype III-B‡‡ | cmr5 | 2ZOP and 2OEB | COG3337 | MTH324 and |
| | | | | | PF1125 |
| cmr6 | Subtype III-B | cmr6 | NA | COG1604 | PF1124 |
| | | | | (RAMP) | |
| csb1 | Subtype I-U | GSU0053 | NA | (RAMP) | Balac_1306 and |
| | | | | | GSU0053 |
| csb2 | Subtype I-U§§ | NA | NA | (RAMP) | Balac_1305 and |
| | | | | | GSU0054 |
| csb3 | Subtype I-U | NA | NA | (RAMP) | Balac_1303§§ |
| csx17 | Subtype I-U | NA | NA | NA | Btus_2683 |
| csx14 | Subtype l-U | NA | NA | NA | GSU0052 |
| csx10 | Subtype I-U | csx10 | NA | (RAMP) | Caur_2274 |
| csx16 | Subtype III-U | VVA1548 | NA | NA | VVA1548 |
| csaX | Subtype III-U | csaX | NA | NA | SSO1438 |
| csx3 | Subtype III-U | csx3 | NA | NA | AF1864 |
| csx1 | Subtype III-U | csa3, csx1, | 1XMX and 2171 | COG1517 and | MJ1666, NE0113, |
| | | csx2, DXTHG, | | COG4006 | PF1127 and TM1812 |
| | | NE0113 and | | | |
| | | TIGR02710 | | | |
| csx15 | Unknown | NA | NA | TTE2665 | TTE2665 |
| csf1 | Type U | csf1 | NA | NA | AFE_1038 |
| csf2 | Type U | csf2 | NA | (RAMP) | AFE_1039 |
| csf3 | Type U | csf3 | NA | (RAMP) | AFE_1040 |
| csf4 | Type U | csf4 | NA | NA | AFE_1037 |

[1107] Linkers

[1108] In one aspect, the Cas9 molecules described herein comprise a REC2 deletion, a REC1_{CT} deletion, and/or a REC1_{SUB} deletion, and a linker disposed between the amino acid residues that flank each deletion, e.g., between the amino acid residues N-terminal and C-terminal to the deletion. Preferably, the linkers used between the amino acid residues that flank each deletion include properties such that the resulting Cas9 molecule properly folds and possesses functional activity. In an embodiment, Cas9 molecules described herein do not contain a linker between the amino acid residues that flank a deletion.

[1109] In another aspect, the Cas9 molecule described herein comprises a linker disposed between a Cas9 core domain (comprising a REC2 deletion, a REC1_{CT} deletion, and/or a REC1_{SUB} deletion) and a heterologous PI domain. The linker is disposed between the C-terminus of the Cas9 core domain and the N-terminus of a heterologous PI domain. In some embodiments, the Cas9 molecule does not contain a linker disposed between a Cas9 core domain and a heterologous PI domain, e.g., the C-terminus of the Cas9 core domain is linked to the N-terminus of the heterologous PI domain.

[1110] Linkers for use in generating recombinant proteins, e.g., multi-domain proteins, are known in the art (Chen et al., Adv Drug Delivery Rev, 65:1357-69, 2013). As an example. any linkers known in the art that maintain the conformation or native fold of the Cas9 molecule (thereby retaining Cas9 activity) can be used. Several properties of linkers, such as length, hydrophobilicty, intrinsic properties of the amino acids residues themselves, and secondary structure should be considered in the context of the goal to maintain native conformation and functional activity of Cas9.

[1111] A flexible linker can be utilized in the Cas9 molecules described herein. Flexible linkers allow a certain degree of movement and/or interaction within and between the joined domains or regions of the protein. Generally, flexible linkers are composed of small, non-polar (e.g., Gly) or polar (e.g., Ser or Thr) amino acids. The small size of these amino acids provides flexibility and allows mobility of the connected domains or regions. Furthermore, the incorporation of Ser or Thr can help maintain the stability of the linker in aqueous solutions by hydrogen bonding with the water molecules, thereby reducing unfavorable interactions between the linker and the other protein moieties. Commonly used flexible linkers are comprised of sequences that primarily consist of Gly and Ser residues. Often, these flexible linkers consist of repeating units of a combination of Gly and Ser residues, e.g., (GGS)x, where the number of repeating units, e.g., x, can be optimized to achieve the appropriate separation of other domains or regions of the protein.

[1112] In some cases, a rigid linker may be preferred if there is significant distance between the joined domains or regions, or to maintain a fixed distance between the joined domains or regions of a protein and independent functions of the domains/regions. Rigid linkers often have defined secondary structure, e.g., alpha helix, or other stabilizing interactions, e.g., salt bridges and disulfide bonds. Rigid linkers commonly contain multiple Pro residues, or repeating combinations of Glu-Pro or Lys-Pro because Pro imposes a strong conformation constraint due to its structure.

[1113] In an embodiment, the linker comprises:
[1114] 1, 2, 3, 4, 5, 6, 7, 8, 9, 10, 15, or 20 amino acid residues;
[1115] Less than 10, 20 or 30 amino acid residues;
[1116] (GGS)x, wherein x is 1, 2, 3, 4, 5, 6, 7, 8, 9, or 10 (SEQ ID NO: 339);
[1117] (GS)x, wherein x is 1, 2, 3, 4, 5, 6, 7, 8, 9, or 10 (SEQ ID NO: 341); or
[1118] (SGSETPGTSESATPES)x, where x is 1, 2, 3, or 4 (also referred to herein interchangeably as XTEN or the XTEN linker) (SEQ ID NO: 344). Alternative linkers may include (GSAGSAAGSGEF)ₓ, wherein x is 1, 2, 3 or 4 (SEQ ID NO: 345) and (SIVAQLSRPDPA)ₓ, wherein x is 1, 2, 3 or 4 (SEQ ID NO: 346). In some embodiments, a combination of linkers may be used, e.g., a combination of an XTEN linker (or other alternative linker), a (GS)ₓ linker, and/or a (GGS)ₓ linker.

[1119] In some embodiments, specific linkers may be preferred depending on the specific deleted sequence or region or the heterologous PI domain. Examples of preferred linkers for Cas9 with a REC2 deletion, a REC1_{CT} deletion, or a REC1_{SUB} deletion are provided in further detail below.

[1120] In some embodiments, the linker length is from about 6 to 60 amino acids. The linker may be, e.g., 6-10, 10-15, 15-20, 20-30, 30-40, 40-50, or 50-60 amino acids in length. The linker may be, e.g., at least 6, 7, 8, 9, 10, 15, 20, 30, 40, or 50 amino acids in length. In other embodiments, the linker is, e.g., at most 7, 8, 9, 10, 15, 20, 30, 40, 50, or 60 amino acids in length. Ranges comprising any combination of these endpoints are also envisioned.

[1121] In some embodiments, the linker is encoded by a nucleic acid sequence of 6 to 60 nucleotides or base pairs. The nucleic acid may be, e.g., 6-10, 10-15, 15-20, 20-30, 30-40, 40-50, or 50-60 nucleotides in length. The linker may be, e.g., at least 6, 7, 8, 9, 10, 15, 20, 30, 40, or 50 nucleotides in length. In some embodiments, the linker is, e.g., at most 7, 8, 9, 10, 15, 20, 30, 40, 50, or 60 nucleotides in length. Ranges comprising any combination of these endpoints are also envisioned.

[1122] In some embodiments, the linker comprises glycine and serine residues. In some embodiments the linker consists of glycine and serine residues. For instance, the linker may comprise one of more modules such as GGS, GSGS (SEQ ID NO: 128), GGGS (SEQ ID NO: 139), GGGGS (SEQ ID NO: 140) or GGSG (SEQ ID NO: 141). In some embodiments, the linker comprises a plurality of modules comprising glycine and serine, e.g., at least 2, 3, 4, 5, 10, or 15 of these modules, and/or at most 3, 4, 5, 10, 15, or 20 of these modules, or any combination of these endpoints. In some embodiments, each module in the linker has the same sequence, and in other embodiments, at least two modules in a linker have different sequences from each other.

[1123] In some embodiments, the linker is an XTEN linker or a variation of an XTEN linker such as SGSETPGTSESA (SEQ ID NO: 135), SGSETPGTSESATPES (SEQ ID NO: 136), or SGSETPGTSESATPEGGSGGS (SEQ ID NO: 137). Additional information on the XTEN linker may be found in Schellenberger et al. (2009), NATURE BIOTECHNOLOGY 27: 1186-1190, the entire contents of which are incorporated herein by reference. Exemplary linker modules are given in Table IV.

TABLE III.7
Exemplary Linker Modules

GGS
GSGS (SEQ ID NO: 138)
GGGS (SEQ ID NO: 139)
GGGGS (SEQ ID NO: 140)
GGSG (SEQ ID NO: 141)
SGSETPGTSESA (SEQ ID NO: 135)
SGSETPGTSESATPES (SEQ ID NO: 136)
SGSETPGTSESATPEGGSGGS (SEQ ID NO: 137)

[1124] Additional exemplary linker modules are given in Table V.

TABLE III.8
Exemplary Linker Modules

| | | Length |
|---|---|---|
| Name | Description | (nt) |
| BBa_J176131 | PLrigid | 60 |
| BBa_J18920 | 2aa GS linker | 6 |
| BBa_J18921 | 6aa [GS]x linker (SEQ ID NO: 142) | 18 |
| BBa_J18922 | 10aa [GS]x linker (SEQ ID NO: 143) | 30 |
| BBa_K105012 | 10 aa flexible protein domain linker | 30 |
| BBa_K133132 | 8 aa protein domain linker | 24 |
| BBa_K1486003 | flexible linker 2x (GGGS) (SEQ ID NO: 139) | 24 |
| BBa_K1486004 | flexible linker 2x (GGGGS) (SEQ ID NO: 140) | 30 |
| BBa_K1486037 | linker | 39 |
| BBa_K157009 | Split fluorophore linker; Freiburg standard | 51 |
| BBa_K157013 | 15 aa flexible glycine-serine protein | 45 |
| | domain linker; Freiburg standard | |
| BBa_K243004 | Short Linker (Gly-Gly-Ser-Gly) (SEQ ID NO: 141) | 12 |
| BBa_K243005 | Middle Linker (Gly-Gly-Ser-Gly)x2 (SEQ ID NO: 144) | 24 |
| BBa_K243006 | Long Linker (Gly-Gly-Ser-Gly)x3 (SEQ ID NO: 145) | 36 |
| BBa_K243029 | GSAT Linker | 108 |
| BBa_K243030 | SEG | 108 |
| BBa_K404300 | SEG-Linker | 108 |
| BBa_K404301 | GSAT-Linker | 108 |
| BBa_K404303 | Z-EGFR-1907_Short-Linker | 192 |
| BBa_K404304 | Z-EGFR-1907_Middle-Linker | 204 |
| BBa_K404305 | Z-EGFR-1907_Long-Linker | 216 |
| BBa_K404306 | Z-EGFR-1907_SEG-Linker | 288 |
| BBa_K416001 | (Gly4Ser)3 Flexible Peptide Linker (SEQ ID NO: 146) | 45 |
| BBa_K648005 | Short Fusion Protein Linker: GGSG with | 12 |
| | standard 25 prefix/suffix (SEQ ID NO: 141) | |
| BBa_K648006 | Long 10AA Fusion Protein Linker with | 30 |
| | Standard 25 Prefix/Suffix | |
| BBa_K648007 | Medium 6AA Fusion Protein Linker: | 18 |
| | GGSGGS with Standard 25 Prefix/Suffix (SEQ ID NO: 147) | |

[1125] Linkers can comprise a direct bond or an atom such as, e.g., an oxygen (O) or sulfur (S), a unit such as —NR— wherein R is hydrogen or alkyl, —C(O)—, —C(O)O—, —C(O)NH—, SO, SO₂, —SO₂NH— or a chain of atoms, such as substituted or unsubstituted alkyl, substituted or unsubstituted alkenyl, substituted or unsubstituted alkynyl, arylalkyl, heteroarylalkyl. In some embodiments, one or more methylenes in the chain of atoms can be replaced with one or more of O, S, S(O), SO₂, —SO₂NH—, —NR—, —NR₂, —C(O)—, —C(O)O—, —C(O)NH—, a cleavable linking group, substituted or unsubstituted aryl, substituted or unsubstituted heteroaryl, and substituted or unsubstituted heterocyclic.

[1126] In some embodiments, the linker comprises an alkylene moiety or a heteroalkylene moiety (e.g., an alkylene glycol moiety such as ethylene glycol). In some embodiments, a linker comprises a poly-L-glutamic acid, polylactic acid, poly(ethyleneimine), an oligosaccharide, an amino acid (e.g., glycine), an amino acid chain, or any other suitable linkage. The linker groups can be biologically inactive, such as a PEG, polyglycolic acid, or polylactic acid chain. In certain embodiments, the linker group represents a derivatized or non-derivatized amino acid (e.g., glycine).

[1127] The length of the linkers can be easily adjusted by changing the copy number of repeating units to achieve an optimal distance between the domains or regions that are to be joined. In embodiments, the different linkers can be joined together to achieve optimal distance, flexibility, or rigidity between the joined domains or regions of a Cas9 molecule.

### IV. Functional Analysis of Candidate Molecules

[1128] Candidate Cas9 molecules, candidate gRNA molecules, candidate Cas9 molecule/gRNA molecule complexes, can be evaluated by art-known methods or as described herein. For example, exemplary methods for evaluating the endonuclease activity of Cas9 molecule are described, e.g., in Jinek et al. (2012) SCIENCE 337(6096): 816-821. The methods in this section may be used, e.g., to test various portions of a gRNA, for example, the targeting domain, the first complementarity domain, the linking domain, the second complementarity domain, the proximal domain, or the tail domain. In some embodiments, the methods in this section are tested to determine whether modifications made in one or more of these domains interfere with targeting efficacy. A gRNA with a selected length, sequence, degree of complementarity, or degree of modification, can be evaluated in a system of this section.

[1129] Binding and Cleavage Assay: Testing the Endonuclease Activity of Cas9 Molecule

[1130] The ability of a Cas9 molecule/gRNA molecule complex to bind to and cleave a target nucleic acid can be evaluated in a plasmid cleavage assay. In this assay, synthetic or in vitro-transcribed gRNA molecule is pre-annealed prior to the reaction by heating to 95° C. and slowly cooling down to room temperature. Native or restriction digest-linearized plasmid DNA (300 ng (˜8 nM)) is incubated for 60 min at 37° C. with purified Cas9 protein molecule (50-500 nM) and gRNA (50-500 nM, 1:1) in a Cas9 plasmid cleavage buffer (20 mM HEPES pH 7.5, 150 mM KCl, 0.5 mM DTT, 0.1 mM EDTA) with or without 10 mM MgCl₂. The reactions are stopped with 5×DNA loading buffer (30% glycerol, 1.2% SDS, 250 mM EDTA), resolved by a 0.8 or 1% agarose gel electrophoresis and visualized by ethidium bromide staining. The resulting cleavage products indicate whether the Cas9 molecule cleaves both DNA strands, or only one of the two strands. For example, linear DNA products indicate the cleavage of both DNA strands. Nicked open circular products indicate that only one of the two strands is cleaved.

[1131] Alternatively, the ability of a Cas9 molecule/gRNA molecule complex to bind to and cleave a target nucleic acid can be evaluated in an oligonucleotide DNA cleavage assay. In this assay, DNA oligonucleotides (10 pmol) are radiolabeled by incubating with 5 units T4 polynucleotide kinase and ˜3-6 pmol (˜20-40 mCi) [γ-32P]-ATP in 1× T4 polynucleotide kinase reaction buffer at 37° C. for 30 min, in a 50 μL reaction. After heat inactivation (65° C. for 20 min), reactions are purified through a column to remove unincorporated label. Duplex substrates (100 nM) are generated by annealing labeled oligonucleotides with equimolar amounts of unlabeled complementary oligonucleotide at 95° C. for 3 min, followed by slow cooling to room temperature. For cleavage assays, gRNA molecules are annealed by heating to 95° C. for 30 s, followed by slow cooling to room temperature. Cas9 (500 nM final concentration) is pre-incubated with the annealed gRNA molecules (500 nM) in cleavage assay buffer (20 mM HEPES pH 7.5, 100 mM KCl, 5 mM MgCl₂, 1 mM DTT, 5% glycerol) in a total volume of 9 μl. Reactions are initiated by the addition of 1 μl target DNA (10 nM) and incubated for 1 h at 37° C. Reactions are quenched by the addition of 20 μl of loading dye (5 mM EDTA, 0.025% SDS, 5% glycerol in formamide) and heated to 95° C. for 5 min. Cleavage products are resolved on 12% denaturing polyacrylamide gels containing 7 M urea and visualized by phosphorimaging. The resulting cleavage products indicate that whether the complementary strand, the non-complementary strand, or both, are cleaved.

[1132] One or both of these assays can be used to evaluate the suitability of a candidate gRNA molecule or candidate Cas9 molecule.

[1133] Binding Assay: Testing the Binding of Cas9 Molecule to Target DNA

[1134] Exemplary methods for evaluating the binding of Cas9 molecule to target DNA are described, e.g., in Jinek et al. 2012 SCIENCE 337(6096): 816-821.

[1135] For example, in an electrophoretic mobility shift assay, target DNA duplexes are formed by mixing of each strand (10 nmol) in deionized water, heating to 95° C. for 3 min and slow cooling to room temperature. All DNAs are purified on 8% native gels containing 1×TBE. DNA bands are visualized by UV shadowing, excised, and eluted by soaking gel pieces in DEPC-treated H₂O. Eluted DNA is ethanol precipitated and dissolved in DEPC-treated H₂O. DNA samples are 5′ end labeled with [7-32P]-ATP using T4 polynucleotide kinase for 30 min at 37° C. Polynucleotide kinase is heat denatured at 65° C. for 20 min, and unincorporated radiolabel is removed using a column. Binding assays are performed in buffer containing 20 mM HEPES pH 7.5, 100 mM KCl, 5 mM MgCl₂, 1 mM DTT and 10% glycerol in a total volume of 10 μl. Cas9 protein molecule is programmed with equimolar amounts of pre-annealed gRNA molecule and titrated from 100 μM to 1 μM. Radiolabeled DNA is added to a final concentration of 20 μM. Samples are incubated for 1 h at 37° C. and resolved at 4° C. on an 8% native polyacrylamide gel containing 1×TBE and 5 mM MgCl₂. Gels are dried and DNA visualized by phosphorimaging.

### Repair Assays: Testing a Cas9 to Promote DNA Repair

[1136] The ability of a Cas9 system to promote DNA repair by a HDR pathway, e.g., HDR or ALT-HR, can be evaluated in a cell-based GFP assay. DNA repair by a HDR pathway is typically used to correct a gene with a mutation or undesired sequence. For this assay, a cell line carrying a non-functional GFP reporter system is used. An exogenous non-functional GFP gene, e.g., a GFP with an inactivating mutation, is delivered, e.g., by transfection, into a cell. Alternatively, the cell line carries one copy of a non-functional GFP gene integrated into the genome of the cell, e.g., by transduction. A candidate Cas9 protein molecule or nucleic acid, a gRNA that mediates binding of the Cas9 to the GFP gene to be corrected, and a template nucleic acid containing a functional, e.g., corrected GFP gene sequence, is delivered, e.g., by transfection, into the cell. An HDR-enhancer molecule is administered to the test cells, and no HDR-enhancer molecule is administered to control cells. The cells are cultured for a sufficient amount of time to allow repair and expression of the GFP gene, and GFP expression is analyzed by flow cytometry. An increase in GFP-expressing (GFP-positive) cells or an increased level of GFP signal, as compared to a control, indicates that DNA repair occurred, resulting in gene correction. GFP positive cells can be collected by cell sorting methods, and further analyzed by various sequencing methods to confirm correction of the targeted locus of the GFP gene.

[1137] The ability of a Cas9 to promote DNA repair by ALT-NHEJ can be evaluated in a cell-based GFP assay. DNA repair by the alt-NHEJ pathway is typically used to disrupt a gene and prevent expression. For this assay, a cell line carrying a functional GFP reporter system is used. An exogenous functional GFP gene, e.g., a wild-type GFP gene, is delivered, e.g., by transfection, into a cell. Alternatively, the cell line carries one copy of a functional or wild-type GFP gene integrated into the genome of the cell, e.g., by transduction. A candidate Cas9 protein molecule or nucleic acid and a gRNA that mediates binding of the Cas9 molecule to the GFP gene is delivered, e.g., by transfection, into the cell. An EPR-enhancer is administered to the test cells, and no EPR-enhancer is administered to control cells. The cells are cultured for a sufficient amount of time to allow repair and expression of the GFP gene, and GFP expression is analyzed by flow cytometry. A decrease in GFP-expressing cells or a decrease in the level of GFP signal, as compared to a control, indicates that DNA repair occurred, resulting in gene disruption. GFP negative cells can be collected by cell sorting methods, and further analyzed by various sequencing methods to confirm disruption of the targeted locus of the GFP gene.

### Differential Scanning Flourimetry (DSF)

[1138] The thermostability of Cas9 molecule-gRNA ribonucleoprotein (RNP) complexes, e.g., a Cas9 molecule-gRNA RNP complex, can be measured via DSF. This technique measures the thermostability of a protein, which can increase under favorable conditions such as the addition of a binding molecule, e.g., a gRNA.

[1139] The assay is performed using two different protocols, one to test the best stoichiometric ratio of gRNA:Cas9 protein and another to determine the best solution conditions for RNP formation.

[1140] To determine the best solution to form RNP complexes, a 2 uM solution of Cas9 in water+10× SYPRO Orange® (Life Technologies cat #S-6650) and dispensed into a 384 well plate. An equimolar amount of gRNA diluted in solutions with varied pH and salt is then added. After incubating at room temperature for 10 min. and brief centrifugation to remove any bubbles, a Bio-Rad CFX384™ Real-Time System C1000 Touch™ Thermal Cycler with the Bio-Rad CFX Manager software is used to run a gradient from 20° C. to 90° C. with a 1° C. increase in temperature every 10 seconds.

[1141] The second assay consists of mixing various concentrations of gRNA with 2 uM Cas9 molecule in optimal buffer from the assay above and incubating at RT for 10 min in a 384 well plate. An equal volume of optimal buffer+10× SYPRO Orange® (Life Techonologies cat #S-6650) is added and the plate sealed with Microseal® B adhesive (MSB-1001). Following brief centrifugation to remove any bubbles, a Bio-Rad CFX384™ Real-Time System C1000 Touch™ Thermal Cycler with the Bio-Rad CFX Manager software is used to run a gradient from 20° C. to 90° C. with a 1° increase in temperature every 10 seconds.

### Resection Assay: Testing a Cas9 to Promote Resection

[1142] The ability of a Cas9 to promote resection can be evaluated by measuring the levels of single stranded DNA at specific double strand break sites in human cells using quantitative methods (as described in Zhou et al., Nucleic Acids Res, 2014, 42(3):e19). In this assay, a cell line is delivered, e.g., by transfection, a candidate Cas9 or a candidate Cas9 fusion protein. The cells are cultured for a sufficient amount of time to allow nuclease activity and resection to occur. Genomic DNA is carefully extracted using a method in which cells are embedded in low-gelling point agar that protects the DNA from shearing and damage during extraction. The genomic DNA is digested with a restriction enzyme that selectively cuts double-stranded DNA. Primers for quantitative PCR that span up to 5 kb of the double strand break site are designed. The results from the PCR reaction show the levels of single strand DNA detected at each of the primer positions. Thus, the length and the level of resection promoted by the candidate Cas9 or Cas9 fusion protein can be determined from this assay.

[1143] Other qualitative assays for identifying the occurrence of resection include the detection of proteins or protein complexes that bind to single-stranded DNA after resection has occurred, e.g., RPA foci, Rad51 foci, or BrDU detection by immunofluorescence. Antibodies for RPA protein and Rad51 are known in the art.

### V. Genome Editing Approaches

[1144] Mutations may be corrected, and undesirable nucleic acid sequences may be cleaved, using one of the approaches discussed herein. In an embodiment, a mutation in a target nucleic acid is corrected by homology directed repair (HDR) using a template nucleic acid (see Section V.1).

### V.1 HDR Repair and Template Nucleic Acids

[1145] As described herein, nuclease-induced homology directed repair (HDR) can be used to alter a target sequence and correct (e.g., repair or edit) a mutation in the genome. While not wishing to be bound by theory, it is believed that alteration of the target sequence occurs by homology-directed repair (HDR) with a donor template or template nucleic acid. For example, the donor template or the template nucleic acid provides for alteration of the target position. It is contemplated that a plasmid donor can be used as a template for homologous recombination. In an embodiment where a double-stranded template nucleic acid is used, the target position is altered by HDR. It is further contemplated that a single stranded donor template can be used as a template for alteration of the target position by alternate methods of homology directed repair (e.g., HR, alt-HR, and/or single strand annealing) between the target position and the donor template. Donor template-effected alteration of a target position depends on target sequence cleavage by a Cas9 molecule. Cleavage by Cas9 can comprise a nick, a double strand break, or two single strand breaks, e.g., one on each strand of the target nucleic acid.

[1146] In an embodiment, a mutation can be corrected by either a single double-strand break or two single strand breaks. In an embodiment, a mutation can be corrected by (1) a single double-strand break, (2) two single strand breaks, (3) two double strand breaks with a break occurring on each side of the target position, (4) one double strand break and two single strand breaks with the double strand break and two single strand breaks occurring on each side of the target position (5) four single strand breaks with a pair of single strand breaks occurring on each side of the target position, or (6) one single strand break. In an embodiment where one single-stranded break is used, the target position can be altered by alternative HDR.

[1147] In an embodiment where a single-stranded template nucleic acid is used, the target position can be altered by alternative HDR.

[1148] Donor template-effected alteration of a target position depends on cleavage by a Cas9 molecule. Cleavage by Cas9 can comprise a nick, a double strand break, or two single strand breaks, e.g., one on each strand of the target nucleic acid. After introduction of the breaks on the target nucleic acid, resection occurs at the break ends resulting in single stranded overhanging DNA regions.

[1149] Methods of promoting HDR pathways, e.g., SSA, alt-HR, and/or HR, are described herein in Section VI.

[1150] Additional details on template nucleic acids are provided in Section IV entitled “Template nucleic acids” in International Application PCT/US2014/057905, Publication Number WO2015/048577.

[1151] Double Strand Break Mediated Correction

[1152] In an embodiment, double strand cleavage is effected by a Cas9 molecule having cleavage activity associated with an HNH-like domain and cleavage activity associated with a RuvC-like domain, e.g., an N-terminal RuvC-like domain, e.g., a wild type Cas9 molecule. Such embodiments require only a single gRNA. In other embodiments, dual gRNAs are required (see, for example, FIG. 2).

[1153] Single Strand Break Mediated Correction

[1154] In some embodiments, one single strand break, or nick, is effected by a Cas9 molecule having nickase activity, e.g., a Cas9 nickase as described herein. A nicked target nucleic acid can be a substrate for alt-HR.

[1155] In other embodiments, two single strand breaks, or nicks, are effected by a Cas9 molecule having nickase activity, e.g., cleavage activity associated with an HNH-like domain or cleavage activity associated with an N-terminal RuvC-like domain. Such embodiments usually require two gRNAs, one for placement of each single strand break. In an embodiment, the Cas9 molecule having nickase activity cleaves the strand to which the gRNA hybridizes, but not the strand that is complementary to the strand to which the gRNA hybridizes. In an embodiment, the Cas9 molecule having nickase activity does not cleave the strand to which the gRNA hybridizes, but rather cleaves the strand that is complementary to the strand to which the gRNA hybridizes.

[1156] In an embodiment, the nickase has HNH activity, e.g., a Cas9 molecule having the RuvC activity inactivated, e.g., a Cas9 molecule having a mutation at D10, e.g., the D10A mutation. D10A inactivates RuvC; therefore, the Cas9 nickase has (only) HNH activity and will cut on the strand to which the gRNA hybridizes (e.g., the complementary strand, which does not have the NGG PAM on it). In other embodiments, a Cas9 molecule having an H840, e.g., an H840A, mutation can be used as a nickase. H840A inactivates HNH; therefore, the Cas9 nickase has (only) RuvC activity and cuts on the non-complementary strand (e.g., the strand that has the NGG PAM and whose sequence is identical to the gRNA).

[1157] In other embodiments, a Cas9 molecule having an N863, e.g., the N863A mutation, mutation can be used as a nickase. N863A inactivates HNH therefore the Cas9 nickase has (only) RuvC activity and cuts on the non-complementary strand (the strand that has the NGG PAM and whose sequence is identical to the gRNA). In other embodiments, a Cas9 molecule having an N580, e.g., the N580A mutation, mutation can be used as a nickase. N580A inactivates HNH therefore the Cas9 nickase has (only) RuvC activity and cuts on the non-complementary strand (the strand that has the NGG PAM and whose sequence is identical to the gRNA). In an embodiment, in which a nickase and two gRNAs are used to position two single strand nicks, one nick is on the + strand and one nick is on the—strand of the target nucleic acid. The PAMs can be outwardly facing. The gRNAs can be selected such that the gRNAs are separated by, from about 0-50, 0-100, or 0-200 nucleotides. In an embodiment, there is no overlap between the target sequences that are complementary to the targeting domains of the two gRNAs. In an embodiment, the gRNAs do not overlap and are separated by as much as 50, 100, or 200 nucleotides. In an embodiment, the use of two gRNAs can increase specificity, e.g., by decreasing off-target binding (Ran et al. (2013) CELL 154: 1380-1389).

[1158] In an embodiment, a single nick can be used to induce HDR, e.g., alt-HR. It is contemplated herein that a single nick can be used to increase the ratio of HR to NHEJ at a given cleavage site. In an embodiment, a single strand break is formed in the strand of the target nucleic acid to which the targeting domain of said gRNA is complementary. In another embodiment, a single strand break is formed in the strand of the target nucleic acid other than the strand to which the targeting domain of said gRNA is complementary.

[1159] Placement of the Double Strand Break or a Single Strand Break Relative to Target Position or Other Landmark

[1160] The double strand break or single strand break in one of the strands should be sufficiently close to target position such that an alteration is produced in the desired region, e.g., correction of a mutation occurs. In an embodiment, the distance is not more than 50, 100, 200, 300, 350 or 400 nucleotides. While not wishing to be bound by theory, in some embodiments, it is believed that the break should be sufficiently close to target position such that the target position is within the region that is subject to exonuclease-mediated removal during end resection. If the distance between the target position and a break is too great, the mutation or other sequence desired to be altered may not be included in the end resection and, therefore, may not be corrected, as donor sequence, either exogenously provided donor sequence or endogenous genomic donor sequence, in some embodiments is only used to correct sequence within the end resection region.

[1161] In an embodiment, the targeting domain is configured such that a cleavage event, e.g., a double strand or single strand break, is positioned within 1, 2, 3, 4, 5, 10, 15, 20, 25, 30, 35, 40, 45, 50, 60, 70, 80, 90, 100, 150 or 200 nucleotides of the region desired to be altered, e.g., a mutation. The break, e.g., a double strand or single strand break, can be positioned upstream or downstream of the region desired to be altered, e.g., a mutation. In some embodiments, a break is positioned within the region desired to be altered, e.g., within a region defined by at least two mutant nucleotides. In some embodiments, a break is positioned immediately adjacent to the region desired to be altered, e.g., immediately upstream or downstream of a mutation.

[1162] In an embodiment, a single strand break is accompanied by an additional single strand break, positioned by a second gRNA molecule, as discussed below. For example, the targeting domains bind configured such that a cleavage event, e.g., the two single strand breaks, are positioned within 1, 2, 3, 4, 5, 10, 15, 20, 25, 30, 35, 40, 45, 50, 60, 70, 80, 90, 100, 150 or 200 nucleotides of a target position. In an embodiment, the first and second gRNA molecules are configured such, that when guiding a Cas9 nickase, a single strand break will be accompanied by an additional single strand break, positioned by a second gRNA, sufficiently close to one another to result in alteration of the desired region. In an embodiment, the first and second gRNA molecules are configured such that a single strand break positioned by said second gRNA is within 10, 20, 30, 40, or 50 nucleotides of the break positioned by said first gRNA molecule, e.g., when the Cas9 is a nickase. In an embodiment, the two gRNA molecules are configured to position cuts at the same position, or within a few nucleotides of one another, on different strands, e.g., essentially mimicking a double strand break.

[1163] In an embodiment, in which a gRNA (unimolecular (or chimeric) or modular gRNA) and Cas9 nuclease induce a double strand break for the purpose of inducing HDR-mediated correction, the cleavage site is between 0-200 bp (e.g., 0-175, 0 to 150, 0 to 125, 0 to 100, 0 to 75, 0 to 50, 0 to 25, 25 to 200, 25 to 175, 25 to 150, 25 to 125, 25 to 100, 25 to 75, 25 to 50, 50 to 200, 50 to 175, 50 to 150, 50 to 125, 50 to 100, 50 to 75, 75 to 200, 75 to 175, 75 to 150, 75 to 125, 75 to 100 bp) away from the target position. In an embodiment, the cleavage site is between 0-100 bp (e.g., 0 to 75, 0 to 50, 0 to 25, 25 to 100, 25 to 75, 25 to 50, 50 to 100, 50 to 75 or 75 to 100 bp) away from the target position.

[1164] In some embodiments, one can promote HDR by using nickases to generate a break with overhangs. While not wishing to be bound by theory, the single stranded nature of the overhangs can enhance the cell's likelihood of repairing the break by HDR as opposed to, e.g., alt-NHEJ or c-NHEJ. Specifically, in some embodiments, HDR is promoted by selecting a first gRNA that targets a first nickase to a first target sequence, and a second gRNA that targets a second nickase to a second target sequence which is on the opposite DNA strand from the first target sequence and offset from the first nick.

[1165] In an embodiment, the targeting domain of a gRNA molecule is configured to position a cleavage event sufficiently far from a preselected nucleotide, e.g., the nucleotide of a coding region, such that the nucleotide is not altered. In an embodiment, the targeting domain of a gRNA molecule is configured to position an intronic cleavage event sufficiently far from an intron/exon border, or naturally occurring splice signal, to avoid alteration of the exonic sequence or unwanted splicing events. The gRNA molecule may be a first, second, third and/or fourth gRNA molecule, as described herein.

### Placement of a First Break and a Second Break Relative to Each Other

[1166] In an embodiment, a double strand break can be accompanied by an additional double strand break, positioned by a second gRNA molecule, as is discussed below.

[1167] In an embodiment, a double strand break can be accompanied by two additional single strand breaks, positioned by a second gRNA molecule and a third gRNA molecule.

[1168] In an embodiment, a first and second single strand breaks can be accompanied by two additional single strand breaks positioned by a third gRNA molecule and a fourth gRNA molecule.

[1169] When two or more gRNAs are used to position two or more cleavage events, e.g., double strand or single strand breaks, in a target nucleic acid, it is contemplated that the two or more cleavage events may be made by the same or different Cas9 proteins. For example, when two gRNAs are used to position two double strand breaks, a single Cas9 nuclease may be used to create both double strand breaks. When two or more gRNAs are used to position two or more single strand breaks (nicks), a single Cas9 nickase may be used to create the two or more nicks. When two or more gRNAs are used to position at least one double strand break and at least one single strand break, two Cas9 proteins may be used, e.g., one Cas9 nuclease and one Cas9 nickase. It is contemplated that when two or more Cas9 proteins are used that the two or more Cas9 proteins may be delivered sequentially to control specificity of a double stranded versus a single strand break at the desired position in the target nucleic acid.

[1170] In some embodiments, the targeting domain of the first gRNA molecule and the targeting domain of the second gRNA molecules are complementary to opposite strands of the target nucleic acid molecule. In some embodiments, the gRNA molecule and the second gRNA molecule are configured such that the PAMs are oriented outward.

[1171] In certain embodiments, two gRNA are selected to direct Cas9-mediated cleavage at two positions that are a preselected distance from each other. In embodiments, the two points of cleavage are on opposite strands of the target nucleic acid. In some embodiments, the two cleavage points form a blunt ended break, and in other embodiments, they are offset so that the DNA ends comprise one or two overhangs (e.g., one or more 5′ overhangs and/or one or more 3′ overhangs). In some embodiments, each cleavage event is a nick. In embodiments, the nicks are close enough together that they form a break that is recognized by the double strand break machinery (as opposed to being recognized by, e.g., the SSBr machinery). In some embodiments, the nicks are far enough apart that they create an overhang that is a substrate for HDR, i.e., the placement of the breaks mimics a DNA substrate that has experienced some resection. For instance, in some embodiments the nicks are spaced to create an overhang that is a substrate for processive resection. In some embodiments, the two breaks are spaced within 25-65 nucleotides of each other. The two breaks may be, e.g., about 25, 30, 35, 40, 45, 50, 55, 60 or 65 nucleotides of each other. The two breaks may be, e.g., at least about 25, 30, 35, 40, 45, 50, 55, 60 or 65 nucleotides of each other. The two breaks may be, e.g., at most about 30, 35, 40, 45, 50, 55, 60 or 65 nucleotides of each other. In some embodiments, the two breaks are about 25-30, 30-35, 35-40, 40-45, 45-50, 50-55, 55-60, or 60-65 nucleotides of each other.

[1172] In some embodiments, the break that mimics a resected break comprises a 3′ overhang (e.g., generated by a DSB and a nick, where the nick leaves a 3′ overhang), a 5′ overhang (e.g., generated by a DSB and a nick, where the nick leaves a 5′ overhang), a 3′ and a 5′ overhang (e.g., generated by three cuts), two 3′ overhangs (e.g., generated by two nicks that are offset from each other), or two 5′ overhangs (e.g., generated by two nicks that are offset from each other).

[1173] In an embodiment, in which two gRNAs (independently, unimolecular (or chimeric) or modular gRNA) complexing with Cas9 nickases induce two single strand breaks for the purpose of inducing HDR-mediated correction, the closer nick is between 0-200 bp (e.g., 0-175, 0 to 150, 0 to 125, 0 to 100, 0 to 75, 0 to 50, 0 to 25, 25 to 200, 25 to 175, 25 to 150, 25 to 125, 25 to 100, 25 to 75, 25 to 50, 50 to 200, 50 to 175, 50 to 150, 50 to 125, 50 to 100, 50 to 75, 75 to 200, 75 to 175, 75 to 150, 75 to 125, 75 to 100 bp) away from the target position and the two nicks will ideally be within 25-65 bp of each other (e.g., 25 to 50, 25 to 45, 25 to 40, 25 to 35, 25 to 30, 30 to 55, 30 to 50, 30 to 45, 30 to 40, 30 to 35, 35 to 55, 35 to 50, 35 to 45, 35 to 40, 40 to 55, 40 to 50, 40 to 45 bp, 45 to 50 bp, 50 to 55 bp, 55 to 60 bp, 60 to 65 bp) and no more than 100 bp away from each other (e.g., no more than 90, 80, 70, 60, 50, 40, 30, 20, 10 or 5 bp away from each other). In an embodiment, the cleavage site is between 0-100 bp (e.g., 0 to 75, 0 to 50, 0 to 25, 25 to 100, 25 to 75, 25 to 50, 50 to 100, 50 to 75 or 75 to 100 bp) away from the target position.

[1174] In one embodiment, two gRNAs, e.g., independently, unimolecular (or chimeric) or modular gRNA, are configured to position a double-strand break on both sides of a target position. In an alternate embodiment, three gRNAs, e.g., independently, unimolecular (or chimeric) or modular gRNA, are configured to position a double strand break (i.e., one gRNA complexes with a Cas9 nuclease) and two single strand breaks or paired single strand breaks (i.e., two gRNAs complex with Cas9 nickases) on either side of the target position. In another embodiment, four gRNAs, e.g., independently, unimolecular (or chimeric) or modular gRNA, are configured to generate two pairs of single strand breaks (i.e., two pairs of two gRNAs complex with Cas9 nickases) on either side of the target position. The double strand break(s) or the closer of the two single strand nicks in a pair will ideally be within 0-500 bp of the target position (e.g., no more than 450, 400, 350, 300, 250, 200, 150, 100, 50 or 25 bp from the target position). When nickases are used, the two nicks in a pair are, in embodiments, within 25-65 bp of each other (e.g., between 25 to 55, 25 to 50, 25 to 45, 25 to 40, 25 to 35, 25 to 30, 50 to 55, 45 to 55, 40 to 55, 35 to 55, 30 to 55, 30 to 50, 35 to 50, 40 to 50, 45 to 50, 35 to 45, 40 to 45 bp, 45 to 50 bp, 50 to 55 bp, 55 to 60 bp, or 60 to 65 bp) and no more than 100 bp away from each other (e.g., no more than 90, 80, 70, 60, 50, 40, 30, 20 or 10 bp).

[1175] When two gRNAs are used to target Cas9 molecules to target DNA breaks, different combinations of Cas9 molecules are envisioned. In some embodiments, a first gRNA is used to target a first Cas9 molecule to a first target position, and a second gRNA is used to target a second Cas9 molecule to a second target position. In some embodiments, the first Cas9 molecule creates a nick on the first strand of the target nucleic acid, and the second Cas9 molecule creates a nick on the opposite strand, resulting in a double strand break (e.g., a blunt ended cut or a cut with overhangs).

[1176] Different combinations of nickases can be chosen to target one single strand break to one strand and a second single strand break to the opposite strand. When choosing a combination, one can take into account that there are nickases having one active RuvC-like domain, and nickases having one active HNH domain. In an embodiment, a RuvC-like domain cleaves the non-complementary strand of the target nucleic acid molecule. In an embodiment, an HNH-like domain cleaves a single stranded complementary domain, e.g., a complementary strand of a double stranded nucleic acid molecule. Generally, if both Cas9 molecules have the same active domain (e.g., both have an active RuvC domain or both have an active HNH domain), one will choose two gRNAs that bind to opposite strands of the target. In more detail, in some embodiments, a first gRNA is complementary with a first strand of the target nucleic acid and binds a nickase having an active RuvC-like domain and causes that nickase to cleave the strand that is non-complementary to that first gRNA, i.e., a second strand of the target nucleic acid; and a second gRNA is complementary with a second strand of the target nucleic acid and binds a nickase having an active RuvC-like domain and causes that nickase to cleave the strand that is non-complementary to that second gRNA, i.e., the first strand of the target nucleic acid. Conversely, in some embodiments, a first gRNA is complementary with a first strand of the target nucleic acid and binds a nickase having an active HNH domain and causes that nickase to cleave the strand that is complementary to that first gRNA, i.e., a first strand of the target nucleic acid; and a second gRNA is complementary with a second strand of the target nucleic acid and binds a nickase having an active HNH domain and causes that nickase to cleave the strand that is complementary to that second gRNA, i.e., the second strand of the target nucleic acid. In another arrangement, if one Cas9 molecule has an active RuvC-like domain and the other Cas9 molecule has an active HNH domain, the gRNAs for both Cas9 molecules can be complementary to the same strand of the target nucleic acid, so that the Cas9 molecule with the active RuvC-like domain will cleave the non-complementary strand and the Cas9 molecule with the HNH domain will cleave the complementary strand, resulting in a double strand break.

### Exemplary Template Nucleic Acids

[1177] A template nucleic acid, as that term is used herein, refers to a nucleic acid sequence which can be used in conjunction with a Cas9 molecule and a gRNA molecule to alter the structure of a target position.

[1178] Target position, as used herein, refers to a site on a target nucleic acid (e.g., the chromosome) that is modified by a Cas9 molecule-dependent process. For example, the target position can be a modified Cas9 molecule cleavage of the target nucleic acid and template nucleic acid directed modification, e.g., correction, of the target position. In an embodiment, a target position can be a site between two nucleotides, e.g., adjacent nucleotides, on the target nucleic acid into which one or more nucleotides are added. The target position may comprise one or more nucleotides that are altered, e.g., corrected, by a template nucleic acid. In an embodiment, the target position is within a target sequence (e.g., the sequence to which the gRNA binds). In an embodiment, a target position is upstream or downstream of a target sequence (e.g., the sequence to which the gRNA binds).

[1179] In an embodiment, the target nucleic acid is modified to have the some or all of the sequence of the template nucleic acid, typically at or near cleavage site(s). In an embodiment, the template nucleic acid is single stranded. In an alternate embodiment, the template nucleic acid is double stranded. In an embodiment, the template nucleic acid is DNA, e.g., double stranded DNA. In an alternate embodiment, the template nucleic acid is single stranded DNA. In an embodiment, the template nucleic acid is encoded on the same vector backbone, e.g., AAV genome or plasmid DNA, as the Cas9 molecule and gRNA. In an embodiment, the template nucleic acid is excised from a vector backbone in vivo, e.g., it is flanked by gRNA recognition sequences. In an embodiment, the template nucleic acid comprises endogenous genomic sequence.

[1180] In an embodiment, the template nucleic acid alters the structure of the target position by participating in a homology directed repair event. In an embodiment, the template nucleic acid alters the sequence of the target position. In an embodiment, the template nucleic acid results in the incorporation of a modified, or non-naturally occurring base into the target nucleic acid.

[1181] Typically, the template sequence undergoes a breakage mediated or catalyzed recombination with the target sequence. In an embodiment, the template nucleic acid includes sequence that corresponds to a site on the target sequence that is cleaved by an eaCas9 mediated cleavage event. In an embodiment, the template nucleic acid includes sequence that corresponds to both, a first site on the target sequence that is cleaved in a first Cas9 mediated event, and a second site on the target sequence that is cleaved in a second Cas9 mediated event.

[1182] In an embodiment, the template nucleic acid can include sequence which results in an alteration in the coding sequence of a translated sequence, e.g., one which results in the substitution of one amino acid for another in a protein product, e.g., transforming a mutant allele into a wild type allele, transforming a wild type allele into a mutant allele, and/or introducing a stop codon, insertion of an amino acid residue, deletion of an amino acid residue, or a nonsense mutation.

[1183] In other embodiments, the template nucleic acid can include sequence which results in an alteration in a non-coding sequence, e.g., an alteration in an intron or in a 5′ or 3′ non-translated or non-transcribed region. Such alterations include an alteration in a control element, e.g., a promoter, enhancer, and an alteration in a cis-acting or trans-acting control element.

[1184] A template nucleic acid having homology with a target position in a gene, e.g., a gene described herein, can be used to alter the structure of a target sequence. The template sequence can be used to alter an unwanted structure, e.g., an unwanted or mutant nucleotide.

[1185] In an embodiment, the template nucleic acid is a single stranded nucleic acid. In another embodiment, the template nucleic acid is a double stranded nucleic acid. In some embodiments, the template nucleic acid comprises a nucleotide sequence, e.g., of one or more nucleotides, that will be added to or will template a change in the target nucleic acid. In other embodiments, the template nucleic acid comprises a nucleotide sequence that may be used to modify the target position. In other embodiments, the template nucleic acid comprises a nucleotide sequence, e.g., of one or more nucleotides, that corresponds to wild type sequence of the target nucleic acid, e.g., of the target position.

[1186] The template nucleic acid may comprise a replacement sequence. In some embodiments, the template nucleic acid comprises a 5′ homology arm. In other embodiments, the template nucleic acid comprises a 3′ homology arm.

[1187] In some embodiments, the template nucleic acid is linear double stranded DNA. The length may be, e.g., about 50-500 base pairs, e.g., about 150, 160, 170, 180, 190, 200, 250, 300, 350, 400, 450, or 500 base pairs. The length may be, e.g., at least 150, 160, 170, 180, 190, 200, 250, 300, 350, 400, 450, or 500 base pairs. In some embodiments, the length is no greater than 150, 160, 170, 180, 190, 200, 250, 300, 350, 400, 450, or 500 base pairs. In some embodiments, a double stranded template nucleic acid has a length of about 160 base pairs, e.g., about 155-165, 150-170, 140-180, 130-190, 120-200, 110-210, 100-220, 90-230, or 80-240 base pairs.

[1188] The template nucleic acid can be linear single stranded DNA. In some embodiments, the template nucleic acid is (i) linear single stranded DNA that can anneal to the nicked strand of the target nucleic acid, (ii) linear single stranded DNA that can anneal to the intact strand of the target nucleic acid, (iii) linear single stranded DNA that can anneal to the transcribed strand of the target nucleic acid, (iv) linear single stranded DNA that can anneal to the non-transcribed strand of the target nucleic acid, or more than one of the preceding. The length may be, e.g., 50-500 nucleotides. The length may be, e.g., about 50-500 nucleotides. The length may be, e.g., about 150-200 nucleotides, e.g., about 150, 160, 170, 180, 190, or 200 nucleotides. The length may be, e.g., at least 150, 160, 170, 180, 190, 200, 250, 300, 350, 400, 450, or 500 nucleotides. In some embodiments, the length is no greater than 150, 160, 170, 180, 190, 200, 250, 300, 350, 400, 450, or 500 nucleotides. In some embodiments, a single stranded template nucleic acid has a length of about 160 nucleotides, e.g., about 155-165, 150-170, 140-180, 130-190, 120-200, 110-210, 100-220, 90-230, or 80-240 nucleotides.

[1189] In some embodiments, the template nucleic acid is circular double stranded DNA, e.g., a plasmid. In some embodiments, the template nucleic acid comprises about 500 to 1000 base pairs of homology on either side of the replacement sequence and/or the nick. In some embodiments, the template nucleic acid comprises about 300, 400, 500, 600, 700, 800, 900, 1000, 1500, or 2000 base pairs of homology 5′ of the nick or replacement sequence, 3′ of the nick or replacement sequence, or both 5′ and 3′ of the nick or replacement sequence. In some embodiments, the template nucleic acid comprises at least 300, 400, 500, 600, 700, 800, 900, 1000, 1500, or 2000 base pairs of homology 5′ of the nick or replacement sequence, 3′ of the nick or replacement sequence, or both 5′ and 3′ of the nick or replacement sequence. In some embodiments, the template nucleic acid comprises no more than 300, 400, 500, 600, 700, 800, 900, 1000, 1500, or 2000 base pairs of homology 5′ of the nick or replacement sequence, 3′ of the nick or replacement sequence, or both 5′ and 3′ of the nick or replacement sequence.

[1190] In some embodiments, the template nucleic acid is an adenovirus vector, e.g., an AAV vector, e.g., a ssDNA molecule of a length and sequence that allows it to be packaged in an AAV capsid. The vector may be, e.g., less than 5 kb and may contain an ITR sequence that promotes packaging into the capsid. The vector may be integration-deficient. In some embodiments, the template nucleic acid comprises about 150 to 1000 nucleotides of homology on either side of the replacement sequence and/or the nick. In some embodiments, the template nucleic acid comprises about 100, 150, 200, 300, 400, 500, 600, 700, 800, 900, 1000, 1500, or 2000 nucleotides 5′ of the nick or replacement sequence, 3′ of the nick or replacement sequence, or both 5′ and 3′ of the nick or replacement sequence. In some embodiments, the template nucleic acid comprises at least 100, 150, 200, 300, 400, 500, 600, 700, 800, 900, 1000, 1500, or 2000 nucleotides 5′ of the nick or replacement sequence, 3′ of the nick or replacement sequence, or both 5′ and 3′ of the nick or replacement sequence. In some embodiments, the template nucleic acid comprises at most 100, 150, 200, 300, 400, 500, 600, 700, 800, 900, 1000, 1500, or 2000 nucleotides 5′ of the nick or replacement sequence, 3′ of the nick or replacement sequence, or both 5′ and 3′ of the nick or replacement sequence.

[1191] In some embodiments, the template nucleic acid is a lentiviral vector, e.g., an IDLV (integration deficiency lentivirus). In some embodiments, the template nucleic acid comprises about 500 to 1000 base pairs of homology on either side of the replacement sequence and/or the nick. In some embodiments, the template nucleic acid comprises about 300, 400, 500, 600, 700, 800, 900, 1000, 1500, or 2000 base pairs of homology 5′ of the nick or replacement sequence, 3′ of the nick or replacement sequence, or both 5′ and 3′ of the nick or replacement sequence. In some embodiments, the template nucleic acid comprises at least 300, 400, 500, 600, 700, 800, 900, 1000, 1500, or 2000 base pairs of homology 5′ of the nick or replacement sequence, 3′ of the nick or replacement sequence, or both 5′ and 3′ of the nick or replacement sequence. In some embodiments, the template nucleic acid comprises no more than 300, 400, 500, 600, 700, 800, 900, 1000, 1500, or 2000 base pairs of homology 5′ of the nick or replacement sequence, 3′ of the nick or replacement sequence, or both 5′ and 3′ of the nick or replacement sequence.

[1192] In some embodiments, the template nucleic acid comprises one or more mutations, e.g., silent mutations, that prevent Cas9 molecule from recognizing and cleaving the template nucleic acid. The template nucleic acid may comprise, e.g., at least 1, 2, 3, 4, 5, 10, 20, or 30 silent mutations relative to the corresponding sequence in the genome of the cell to be altered. In some embodiments, the template nucleic acid comprises at most 2, 3, 4, 5, 10, 20, 30, or 50 silent mutations relative to the corresponding sequence in the genome of the cell to be altered.

[1193] In an embodiment, the template nucleic acid alters the structure of the target position by participating in a homology directed repair event. In an embodiment, the template nucleic acid alters the sequence of the target position. In an embodiment, the template nucleic acid results in the incorporation of a modified, or non-naturally occurring base into the target nucleic acid.

[1194] Typically, the template sequence undergoes a breakage mediated or catalyzed recombination with the target sequence. In an embodiment, the template nucleic acid includes sequence that corresponds to a site on the target sequence that is cleaved by an eaCas9 mediated cleavage event. In an embodiment, the template nucleic acid includes sequence that corresponds to both, a first site on the target sequence that is cleaved in a first Cas9 mediated event, and a second site on the target sequence that is cleaved in a second Cas9 mediated event.

[1195] In an embodiment, the template nucleic acid can include sequence which results in an alteration in the coding sequence of a translated sequence, e.g., one which results in the substitution of one amino acid for another in a protein product, e.g., transforming a mutant allele into a wild type allele, transforming a wild type allele into a mutant allele, and/or introducing a stop codon, insertion of an amino acid residue, deletion of an amino acid residue, or a nonsense mutation. In an embodiment, the template nucleic acid can include sequence which results in an alteration in a coding sequence, e.g., an alteration in an exon.

[1196] In other embodiments, the template nucleic acid can include sequence which results in an alteration in a non-coding sequence, e.g., an alteration in an intron or in a 5′ or 3′ non-translated or non-transcribed region. Such alterations include an alteration in a control element, e.g., a promoter, enhancer, and an alteration in a cis-acting or trans-acting control element.

[1197] A template nucleic acid having homology with a target position can be used to alter the structure of a target sequence. The template sequence can be used to alter an unwanted structure, e.g., an unwanted or mutant nucleotide.

### Length of the Homology Arms

[1198] The homology arm should extend at least as far as the region in which end resection may occur, e.g., in order to allow the resected single stranded overhang to find a complementary region within the donor template. The overall length could be limited by parameters such as plasmid size or viral packaging limits. In an embodiment, a homology arm does not extend into repeated elements, e.g., ALU elements or LINE elements.

[1199] Exemplary homology arm lengths include at least 50, 100, 250, 500, 750, 1000, 2000, 3000, 4000, or 5000 nucleotides. In some embodiments, the homology arm length is 50-100, 100-250, 250-500, 500-750, 750-1000, 1000-2000, 2000-3000, 3000-4000, or 4000-5000 nucleotides.

[1200] A template nucleic acid typically comprises the following components:

[1201] [5′ homology arm]-[replacement sequence]-[3′ homology arm].

[1202] The homology arms provide for recombination into the chromosome, thus replacing the undesired element, e.g., a mutation or signature, with the replacement sequence. In an embodiment, the homology arms flank the most distal cleavage sites.

[1203] In an embodiment, the 3′ end of the 5′ homology arm is the position next to the 5′ end of the replacement sequence. In an embodiment, the 5′ homology arm can extend at least 10, 20, 30, 40, 50, 100, 200, 300, 400, 500, 600, 700, 800, 900, 1000, 1500, 2000, 3000, 4000, or 5000 nucleotides 5′ from the 5′ end of the replacement sequence.

[1204] In an embodiment, the 5′ end of the 3′ homology arm is the position next to the 3′ end of the replacement sequence. In an embodiment, the 3′ homology arm can extend at least 10, 20, 30, 40, 50, 100, 200, 300, 400, 500, 600, 700, 800, 900, 1000, 1500, 2000, 3000, 4000, or 5000 nucleotides 3′ from the 3′ end of the replacement sequence.

[1205] In an embodiment, to correct a mutation, the homology arms, e.g., the 5′ and 3′ homology arms, may each comprise about 1000 base pairs (bp) of sequence flanking the most distal gRNAs (e.g., 1000 bp of sequence on either side of the mutation).

[1206] It is contemplated herein that one or both homology arms may be shortened to avoid including certain sequence repeat elements, e.g., Alu elements or LINE elements. For example, a 5′ homology arm may be shortened to avoid a sequence repeat element. In other embodiments, a 3′ homology arm may be shortened to avoid a sequence repeat element. In some embodiments, both the 5′ and the 3′ homology arms may be shortened to avoid including certain sequence repeat elements.

[1207] It is contemplated herein that template nucleic acids for correcting a mutation may be designed for use as a single-stranded oligonucleotide, e.g., a single-stranded oligodeoxynucleotide (ssODN). When using a ssODN, 5′ and 3′ homology arms may range up to about 200 base pairs (bp) in length, e.g., at least 25, 50, 75, 100, 125, 150, 175, or 200 bp in length. Longer homology arms are also contemplated for ssODNs as improvements in oligonucleotide synthesis continue to be made. In some embodiments, a longer homology arm is made by a method other than chemical synthesis, e.g., by denaturing a long double stranded nucleic acid and purifying one of the strands, e.g., by affinity for a strand-specific sequence anchored to a solid substrate.

[1208] While not wishing to be bound by theory, in some embodiments HDR proceeds more efficiently when the template nucleic acid has extended homology 5′ to the nick (i.e., in the 5′ direction of the nicked strand) (see FIGS. 3 and 4). Accordingly, in some embodiments, the template nucleic acid has a longer homology arm and a shorter homology arm, wherein the longer homology arm can anneal 5′ of the nick. In some embodiments, the arm that can anneal 5′ to the nick is at least 25, 50, 75, 100, 125, 150, 175, or 200, 300, 400, 500, 600, 700, 800, 900, 1000, 1500, 2000, 3000, 4000, or 5000 nucleotides from the nick or the 5′ or 3′ end of the replacement sequence. In some embodiments, the arm that can anneal 5′ to the nick is at least 10%, 20%, 30%, 40%, or 50% longer than the arm that can anneal 3′ to the nick. In some embodiments, the arm that can anneal 5′ to the nick is at least 2×, 3×, 4×, or 5× longer than the arm that can anneal 3′ to the nick. Depending on whether a ssDNA template can anneal to the intact strand or the nicked strand, the homology arm that anneals 5′ to the nick may be at the 5′ end of the ssDNA template or the 3′ end of the ssDNA template, respectively.

[1209] Similarly, in some embodiments, the template nucleic acid has a 5′ homology arm, a replacement sequence, and a 3′ homology arm, such that the template nucleic acid has extended homology to the 5′ of the nick. For example, the 5′ homology arm and 3′ homology arm may be substantially the same length, but the replacement sequence may extend farther 5′ of the nick than 3′ of the nick. In some embodiments, the replacement sequence extends at least 10%, 20%, 30%, 40%, 50%, 2×, 3×, 4×, or 5x further to the 5′ end of the nick than the 3′ end of the nick.

While not wishing to be bound by theory, in some embodiments alt-HR proceeds more efficiently when the template nucleic acid is centered on the nick. Accordingly, in some embodiments, the template nucleic acid has two homology arms that are essentially the same size. For instance, the first homology arm of a template nucleic acid may have a length that is within 10%, 9%, 8%, 7%, 6%, 5%, 4%, 3%, 2%, or 1% of the second homology arm of the template nucleic acid.

[1210] Similarly, in some embodiments, the template nucleic acid has a 5′ homology arm, a replacement sequence, and a 3′ homology arm, such that the template nucleic acid extends substantially the same distance on either side of the nick. For example, the homology arms may have different lengths, but the replacement sequence may be selected to compensate for this. For example, the replacement sequence may extend further 5′ from the nick than it does 3′ of the nick, but the homology arm 5′ of the nick is shorter than the homology arm 3′ of the nick, to compensate. The converse is also possible, e.g., that the replacement sequence may extend further 3′ from the nick than it does 5′ of the nick, but the homology arm 3′ of the nick is shorter than the homology arm 5′ of the nick, to compensate.

[1211] Exemplary Arrangements of Linear Nucleic Acid Template Systems

[1212] In an embodiment, the nucleic acid template system is double stranded. In an embodiment, the nucleic acid template system is single stranded. In an embodiment, the nucleic acid template system comprises a single stranded portion and a double stranded portion.

[1213] In an embodiment, the template nucleic acid comprises about 50 to 500 base pairs. In an embodiment, the template nucleic acid comprises about 50 to 100, e.g., 55 to 95, 60 to 90, 65 to 85, or 70 to 80, base pairs, homology on either side of the nick and/or replacement sequence. In an embodiment, the template nucleic acid comprises about 50, 55, 60, 65, 70, 75, 80, 85, 90, 95, or 100 base pairs homology 5′ of the nick or replacement sequence, 3′ of the nick or replacement sequence, or both 5′ and 3′ of the nick or replacement sequences.

[1214] In an embodiment, the template nucleic acid comprises about 150 to 200, e.g., 155 to 195, 160 to 190, 165 to 185, or 170 to 180, base pairs homology 3′ of the nick and/or replacement sequence. In an embodiment, the template nucleic acid comprises about 150, 155, 160, 165, 170, 175, 180, 185, 190, 195, or 200 base pairs homology 3′ of the nick or replacement sequence. In an embodiment, the template nucleic acid comprises less than about 100, 90, 80, 70, 60, 50, 40, 30, 20, 15, or 10 base pairs homology 5′ of the nick or replacement sequence.

[1215] In an embodiment, the template nucleic acid comprises about 150 to 200, e.g., 155 to 195, 160 to 190, 165 to 185, or 170 to 180, base pairs homology 5′ of the nick and/or replacement sequence. In an embodiment, the template nucleic acid comprises about 150, 155, 160, 165, 170, 175, 180, 185, 190, 195, or 200 base pairs homology 5′ of the nick or replacement sequence. In an embodiment, the template nucleic acid comprises less than about 100, 90, 80, 70, 60, 50, 40, 30, 20, 15, or 10 base pairs homology 3′ of the nick or replacement sequence.

[1216] Exemplary Arrangements of Circular Nucleic Acid Template Systems

[1217] In an embodiment, the nucleic acid template system is double stranded. In an embodiment, the nucleic acid template system is double stranded comprises a single stranded portion and a double stranded portion. In an embodiment, the nucleic acid template system is single stranded. In one embodiment, the nucleic acid template system is a plasmid. In another embodiment, the nucleic acid template is an endogenous nucleic acid. In another embodiment, the nucleic acid template is present in an AAV or an IDLV.

[1218] In an embodiment, the template nucleic acid comprises about 500 to 2000, e.g., 700 to 1900, 800 to 1800, 900 to 1700, 900 to 1600, 1000 to 1500, 1100 to 1400, or 1200 to 1300 base pairs, homology on either side of the nick and/or replacement sequence. In an embodiment, the template nucleic acid comprises about 500, 600, 700, 800, 900, 1000, 1100, 1200, 1300, 1400, 1500, 1600, 1700, 1800, 1900, or 2000 base pairs homology 5′ of the nick or replacement sequence, 3′ of the nick or replacement sequence, or both 5′ and 3′ of the nick or replacement sequences.

[1219] In an embodiment, the template nucleic acid comprises about 500 to 2000, e.g., 700 to 1900, 800 to 1800, 900 to 1700, 900 to 1600, 1000 to 1500, 1100 to 1400, or 1200 to 1300, base pairs homology 3′ of the nick and/or replacement sequence. In an embodiment, the template nucleic acid comprises about 500, 600, 700, 800, 900, 1000, 1100, 1200, 1300, 1400, 1500, 1600, 1700, 1800, 1900, or 2000 base pairs homology 3′ of the nick or replacement sequence. In an embodiment, the template nucleic acid comprises less than about 500, 400, 300, 200, 100, or 50 base pairs homology 5′ of the nick or replacement sequence.

[1220] In an embodiment, the template nucleic acid comprises about 500 to 2000, e.g., 700 to 1900, 800 to 1800, 900 to 1700, 900 to 1600, 1000 to 1500, 1100 to 1400, or 1200 to 1300, base pairs homology 5′ of the nick and/or replacement sequence. In an embodiment, the template nucleic acid comprises about 500, 600, 700, 800, 900, 1000, 1100, 1200, 1300, 1400, 1500, 1600, 1700, 1800, 1900, or 2000 base pairs homology 5′ of the nick or replacement sequence. In an embodiment, the template nucleic acid comprises less than about 500, 400, 300, 200, 100, or 50 base pairs homology 3′ of the nick or replacement sequence.

### Methods of Promoting Break Repair by an HDR Pathway

[1221] In another aspect, disclosed herein is a method of altering a cell, e.g., altering the structure, e.g., altering the sequence, of a target nucleic acid of a cell, comprising contacting the cell with: (a) a gRNA that targets a target position, e.g., a gRNA as described herein; (b) a Cas9 molecule, e.g., a Cas9 molecule as described herein; (c) a template nucleic acid, (d) an HDR-enhancer and optionally, (e) a second, third and/or fourth gRNA, as described herein. The methods can comprise contacting said cell with (a) and (b). The methods can comprise contacting said cell with (a), (b), and (c), and/or with (a), (b), (c) and (d).

[1222] The contacting may be performed ex vivo and the contacted cell may be returned to the subject's body after the contacting step. In other embodiments, the contacting step may be performed in vivo.

[1223] In some embodiments, contacting a cell with a Cas9 molecule comprises contacting the cell with a nucleic acid encoding the Cas9 molecule and allowing the cell to produce the Cas9 molecule. In some embodiments, contacting a cell with a gRNA comprises contacting the cell with DNA that can direct transcription of the gRNA, and allowing the cell to produce the gRNA.

[1224] In some embodiments, the method of altering a cell, as described herein, comprises acquiring knowledge of the presence of an undesired sequence in said cell, prior to the contacting step. Acquiring knowledge of the sequence of the undesired sequence in the cell may be by DNA sequencing.

[1225] In some embodiments, the contacting step of the method comprises contacting the cell with a nucleic acid, e.g., a vector, e.g., an AAV vector, that expresses or comprises at least one of (a), (b), (c), (d), and optionally (e). In some embodiments, the contacting step of the method comprises contacting the cell with a nucleic acid, e.g., a vector, e.g., an AAV vector, that expresses or comprises each of (a), (b), (c), (d), and optionally (e). In some embodiments, the contacting step of the method comprises contacting the cell with a nucleic acid, e.g., a vector, e.g., an AAV vector, that expresses or comprises two, three, or four of (a), (b), (c), (d), and optionally (e). In some embodiments, the contacting step of the method comprises contacting the cell with a nucleic acid, e.g., a vector, e.g., an AAV vector, that expresses or comprises each of (a) and (b). In another embodiment, the contacting step of the method comprises delivering to the cell a Cas9 molecule of (b), a nucleic acid which encodes a gRNA according to (a), and a template nucleic acid of (c), optionally a HDR-enhancer of (d), and optionally, a second gRNA (e)(i) (and further optionally, a third gRNA (e)(iv) and/or fourth gRNA (e)(iii)).

[1226] The contacting step of the method can comprise contacting the cell with a nucleic acid, e.g., a vector, e.g., an AAV vector, that expresses or comprises at least one of (a), (b), (c) and (d). In some embodiments, the contacting step of the method comprises contacting the cell with a nucleic acid, e.g., a vector, e.g., an AAV vector, that expresses each of (a), (b), and (c). In another embodiment, the contacting step of the method comprises delivering to the cell a Cas9 molecule of (b), a nucleic acid which encodes a gRNA (a) and a template nucleic acid of (c), optionally an HDR-enhancer of (d), and optionally, a second gRNA (e)(i) (and further optionally, a third gRNA (e)(iv) and/or fourth gRNA (e)(iii).

[1227] In an embodiment, contacting comprises contacting the cell with a nucleic acid, e.g., a vector, e.g., an AAV vector, e.g., an AAV2 vector, a modified AAV2 vector, an AAV3 vector, a modified AAV3 vector, an AAV6 vector, a modified AAV6 vector, an AAV8 vector or an AAV9 vector.

[1228] In an embodiment, contacting comprises delivering to the cell a Cas9 molecule, as a protein or an mRNA, and a nucleic acid which encodes or comprises a gRNA molecule and an HDR-enhancer molecule, and optionally a template nucleic acid and/or a second gRNA molecule.

[1229] In some embodiments, contacting comprises delivering to the cell a Cas9 molecule of (b), as a protein or an mRNA, said gRNA of (a), as an RNA, and optionally said second gRNA of (e), as an RNA, and optionally (c) as a nucleic acid. In some embodiments, the HDR-enhancer of (d) is delivered as a nucleic acid, e.g., DNA or RNA. In some embodiments, the HDR-enhancer of (d) is delivered as a functional nucleic acid such as a siRNA or RNAi oligonucleotide. In some embodiments, the HDR-enhancer of (d) is delivered as a nucleic acid, e.g., mRNA, that encodes a protein. In some embodiments, the HDR-enhancer molecule is delivered as a HDR-enhancing gRNA. In some embodiments, the HDR-enhancing gRNA is delivered in combination with an eiCas9 molecule. In some embodiments, the HDR-enhancing gRNA is delivered in combination with an eaCas9 molecule.

[1230] In some embodiment, contacting comprises delivering to the cell a gRNA of (a) as an RNA, optionally said second gRNA of (e) as an RNA, and a nucleic acid that encodes the Cas9 molecule of (b), (c) as a nucleic acid, and optionally (d) as a nucleic acid.

[1231] In some embodiments, a subject is treated by inducing a Cas9-mediated break at a target position, wherein the target position causes or exacerbates a disease or disorder, and administering a template nucleic acid and an HDR enhancer, wherein the break is repaired by HDR.

[1232] The method of treating a subject may comprise contacting the subject (or a cell from the subject) with (c) a template nucleic acid. A template nucleic acid is used when the method of treating a subject uses HDR to alter the sequence of the target nucleic acid of the subject.

In an embodiment, the method comprises acquiring knowledge of an undesired sequence in said subject, e.g., by DNA sequencing.

[1233] In an embodiment, the method comprises correcting an undesired sequence by HDR.

[1234] When the method comprises correcting an undesired sequence by HDR, a Cas9 molecule of (b), at least one guide RNA, e.g., a guide RNA of (a) and a template nucleic acid (c) can be included in the contacting step.

[1235] In an embodiment, a cell of the subject is contacted ex vivo with one or more of, e.g., all of (a), (b), (c) and (d). In an embodiment, said cell is returned to the subject's body.

[1236] In an embodiment, a cell of the subject is contacted is in vivo with one or more of, e.g., all of (a), (b) (c) and (d).

[1237] In an embodiment, the cell of the subject can also be contacted in vivo by intravenous delivery of one or more of, e.g., all of (a), (b), (c), and (d).

[1238] In an embodiment, contacting comprises contacting the subject with a nucleic acid, e.g., a vector, e.g., an AAV vector, described herein, e.g., a nucleic acid that encodes or comprises at least one of, e.g., all of, (a), (b), (c), and (d).

[1239] In an embodiment, contacting comprises delivering to said subject said Cas9 molecule of (b), as a protein or mRNA, and one or more nucleic acid which encodes or comprises at least one of, e.g., all of, (a), (c), and (d).

[1240] In an embodiment, contacting comprises delivering to the subject the Cas9 molecule of (b), as a protein or mRNA, the gRNA of (a), as an RNA, a nucleic acid of (c) and optionally the HDR-enhancer of (d), as an RNA.

[1241] In an embodiment, contacting comprises delivering to the subject the gRNA of (a), as an RNA, a nucleic acid that encodes the Cas9 molecule of (b), a nucleic acid of (c), and optionally an HDR-enhancer of (d).

[1242] In an embodiment, a cell of the subject can be contacted ex vivo with (a), (b), (c) and (d). In an embodiment, said cell is returned to the subject's body.

[1243] In an embodiment, contacting comprises contacting the subject with a nucleic acid, e.g., a vector, e.g., an AAV vector, described herein, e.g., a nucleic acid that encodes or comprises at least one, e.g., all of, of (a), (b), (c), and (d).

[1244] In an embodiment, contacting comprises delivering to the subject the Cas9 molecule of (b), as a protein or mRNA, and a nucleic acid which encodes or comprises one or more of (a), (c), and (d).

[1245] In an embodiment, contacting comprises delivering to the subject the Cas9 molecule of (b), as a protein or mRNA, the gRNA of (a), as an RNA, and the template nucleic acid of (c) as a DNA.

[1246] In an embodiment, contacting comprises delivering to the subject the gRNA of (a), as an RNA, optionally said second gRNA of (e), as an RNA, and a nucleic acid that encodes the Cas9 molecule of (b), and a nucleic acid that encodes the template nucleic acid of (d).

[1247] Examples of gRNAs in Genome Editing Methods

[1248] gRNA molecules as described herein can be used with Cas9 molecules that generate a double strand break or a single strand break to alter the sequence of a target nucleic acid, e.g., a target position. gRNA molecules useful in these methods are described below.

[1249] In some embodiments, the gRNA is used in making double strand breaks. In an embodiment, the gRNA, e.g., a chimeric gRNA, is configured such that it comprises one or more of the following properties:
[1250] a) it can position, e.g., when targeting a Cas9 molecule that makes double strand breaks, a double strand break (i) within 50, 100, 150 or 200 nucleotides of a target position, or (ii) sufficiently close that the target position is within the region of end resection;
[1251] b) it has a targeting domain of at least 17 nucleotides, e.g., a targeting domain of (i) 17, (ii) 18, or (iii) 20 nucleotides; and
[1252] c)
[1253] (i) the proximal and tail domain, when taken together, comprise at least 15, 18, 20, 25, 30, 31, 35, 40, 45, 49, 50, or 53 nucleotides, e.g., at least 15, 18, 20, 25, 30, 31, 35, 40, 45, 49, 50, or 53 nucleotides from a naturally occurring S. aureus, S. thermophilus, or N. meningitidis tail and proximal domain, or a sequence that differs by no more than 1, 2, 3, 4, 5, 6, 7, 8, 9 or 10 nucleotides therefrom;
[1254] (ii) there are at least 15, 18, 20, 25, 30, 31, 35, 40, 45, 49, 50, or 53 nucleotides 3′ to the last nucleotide of the second complementarity domain, e.g., at least 15, 18, 20, 25, 30, 31, 35, 40, 45, 49, 50, or 53 nucleotides from the corresponding sequence of a naturally occurring S. aureus, S. thermophilus, or N. meningitidis gRNA, or a sequence that differs by no more than 1, 2, 3, 4, 5, 6, 7, 8, 9 or 10 nucleotides therefrom;
[1255] (iii) there are at least 16, 19, 21, 26, 31, 32, 36, 41, 46, 50, 51, or 54 nucleotides 3′ to the last nucleotide of the second complementarity domain that is complementary to its corresponding nucleotide of the first complementarity domain, e.g., at least 16, 19, 21, 26, 31, 32, 36, 41, 46, 50, 51, or 54 nucleotides from the corresponding sequence of a naturally occurring S. aureus, S. thermophilus, or N. meningitidis gRNA, or a sequence that differs by no more than 1, 2, 3, 4, 5, 6, 7, 8, 9 or 10 nucleotides therefrom;
[1256] iv) the tail domain is at least 10, 15, 20, 25, 30, 35 or 40 nucleotides in length, e.g., it comprises at least 10, 15, 20, 25, 30, 35 or 40 nucleotides from a naturally occurring S. aureus, S. thermophilus, or N. meningitidis tail domain; or a sequence that differs by no more than 1, 2, 3, 4, 5, 6, 7, 8, 9 or 10 nucleotides therefrom; or
[1257] (v) the tail domain comprises 15, 20, 25, 30, 35, 40 nucleotides or all of the corresponding portions of a naturally occurring tail domain, e.g., a naturally occurring S. aureus, S. thermophilus, or N. meningitidis tail domain.

[1258] In an embodiment, the gRNA is configured such that it comprises properties: a and b(i).

[1259] In an embodiment, the gRNA is configured such that it comprises properties: a and b(ii).

[1260] In an embodiment, the gRNA is configured such that it comprises properties: a and b(iii).

[1261] In an embodiment, the gRNA is configured such that it comprises properties: a and c.

[1262] In an embodiment, the gRNA is configured such that in comprises properties: a, b, and c.

[1263] In an embodiment, the gRNA is configured such that in comprises properties: a(i), b(i), and c(i).

[1264] In an embodiment, the gRNA is configured such that in comprises properties: a(i), b(i), and c(ii).

[1265] In an embodiment, the gRNA is configured such that in comprises properties: a(i), b(iii), and c(i).

[1266] In an embodiment, the gRNA is configured such that in comprises properties: a(i), b(iii), and c(ii).

[1267] In some embodiments, the gRNA is used in making single strand breaks. In an embodiment, the gRNA, e.g., a chimeric gRNA, is configured such that it comprises one or more of the following properties:
[1268] a) it can position, e.g., when targeting a Cas9 molecule that makes single strand breaks, a single strand break (i) within 50, 100, 150 or 200 nucleotides of a target position, or (ii) sufficiently close that the target position is within the region of end resection;
[1269] b) it has a targeting domain of at least 17 nucleotides, e.g., a targeting domain of (i) 17, (ii) 18, or (iii) 20 nucleotides; and
[1270] c)
[1271] (i) the proximal and tail domain, when taken together, comprise at least 15, 18, 20, 25, 30, 31, 35, 40, 45, 49, 50, or 53 nucleotides, e.g., at least 15, 18, 20, 25, 30, 31, 35, 40, 45, 49, 50, or 53 nucleotides from a naturally occurring S. aureus, S. thermophilus, or N. meningitidis tail and proximal domain, or a sequence that differs by no more than 1, 2, 3, 4, 5, 6, 7, 8, 9 or 10 nucleotides therefrom;
[1272] (ii) there are at least 15, 18, 20, 25, 30, 31, 35, 40, 45, 49, 50, or 53 nucleotides 3′ to the last nucleotide of the second complementarity domain, e.g., at least 15, 18, 20, 25, 30, 31, 35, 40, 45, 49, 50, or 53 nucleotides from the corresponding sequence of a naturally occurring S. aureus, S. thermophilus, or N. meningitidis gRNA, or a sequence that differs by no more than 1, 2, 3, 4, 5, 6, 7, 8, 9 or 10 nucleotides therefrom;
[1273] (iii) there are at least 16, 19, 21, 26, 31, 32, 36, 41, 46, 50, 51, or 54 nucleotides 3′ to the last nucleotide of the second complementarity domain that is complementary to its corresponding nucleotide of the first complementarity domain, e.g., at least 16, 19, 21, 26, 31, 32, 36, 41, 46, 50, 51, or 54 nucleotides from the corresponding sequence of a naturally occurring S. aureus, S. thermophilus, or N. meningitidis gRNA, or a sequence that differs by no more than 1, 2, 3, 4, 5, 6, 7, 8, 9 or 10 nucleotides therefrom;
[1274] iv) the tail domain is at least 10, 15, 20, 25, 30, 35 or 40 nucleotides in length, e.g., it comprises at least 10, 15, 20, 25, 30, 35 or 40 nucleotides from a naturally occurring S. aureus, S. thermophilus, or N. meningitidis tail domain; or, a sequence that differs by no more than 1, 2, 3, 4, 5, 6, 7, 8, 9 or 10 nucleotides therefrom; or
[1275] (v) the tail domain comprises 15, 20, 25, 30, 35, 40 nucleotides or all of the corresponding portions of a naturally occurring tail domain, e.g., a naturally occurring S. aureus, S. thermophilus, or N. meningitidis tail domain.

[1276] In an embodiment, the gRNA is configured such that it comprises properties: a and b(i).

[1277] In an embodiment, the gRNA is configured such that it comprises properties: a and b(ii).

[1278] In an embodiment, the gRNA is configured such that it comprises properties: a and b(iii).

[1279] In an embodiment, the gRNA is configured such that it comprises properties: a and c.

[1280] In an embodiment, the gRNA is configured such that in comprises properties: a, b, and c.

[1281] In an embodiment, the gRNA is configured such that in comprises properties: a(i), b(i), and c(i).

[1282] In an embodiment, the gRNA is configured such that in comprises properties: a(i), b(i), and c(ii).

[1283] In an embodiment, the gRNA is configured such that in comprises properties: a(i), b(iii), and c(i).

[1284] In an embodiment, the gRNA is configured such that in comprises properties: a(i), b(iii), and c(ii).

[1285] In an embodiment, the gRNA is used with a Cas9 nickase molecule having HNH activity, e.g., a Cas9 molecule having the RuvC activity inactivated, e.g., a Cas9 molecule having a mutation at D10, e.g., the D10A mutation.

[1286] In an embodiment, the gRNA is used with a Cas9 nickase molecule having RuvC activity, e.g., a Cas9 molecule having the HNH activity inactivated, e.g., a Cas9 molecule having a mutation at H840, e.g., a H840A.

[1287] In an embodiment, a pair of gRNAs, e.g., a pair of chimeric gRNAs, comprising a first and a second gRNA, is configured such that they comprises one or more of the following properties:
[1288] a) one or both of the gRNAs can position, e.g., when targeting a Cas9 molecule that makes single strand breaks, a single strand break within (i) 50, 100, 150 or 200 nucleotides of a target position, or (ii) sufficiently close that the target position is within the region of end resection;
[1289] b) one or both have a targeting domain of at least 17 nucleotides, e.g., a targeting domain of (i) 17 or (ii) 18 nucleotides;
[1290] c) for one or both:
[1291] (i) the proximal and tail domain, when taken together, comprise at least 15, 18, 20, 25, 30, 31, 35, 40, 45, 49, 50, or 53 nucleotides, e.g., at least 15, 18, 20, 25, 30, 31, 35, 40, 45, 49, 50, or 53 nucleotides from a naturally occurring S. aureus, S. thermophilus, or N. meningitidis tail and proximal domain, or a sequence that differs by no more than 1, 2, 3, 4, 5, 6, 7, 8, 9 or 10 nucleotides therefrom;
[1292] (ii) there are at least 15, 18, 20, 25, 30, 31, 35, 40, 45, 49, 50, or 53 nucleotides 3′ to the last nucleotide of the second complementarity domain, e.g., at least 15, 18, 20, 25, 30, 31, 35, 40, 45, 49, 50, or 53 nucleotides from the corresponding sequence of a naturally occurring S. aureus, S. thermophilus, or N. meningitidis gRNA, or a sequence that differs by no more than 1, 2, 3, 4, 5, 6, 7, 8, 9 or 10 nucleotides therefrom;
[1293] (iii) there are at least 16, 19, 21, 26, 31, 32, 36, 41, 46, 50, 51, or 54 nucleotides 3′ to the last nucleotide of the second complementarity domain that is complementary to its corresponding nucleotide of the first complementarity domain, e.g., at least 16, 19, 21, 26, 31, 32, 36, 41, 46, 50, 51, or 54 nucleotides from the corresponding sequence of a naturally occurring S. aureus, S. thermophilus, or N. meningitidis gRNA, or a sequence that differs by no more than 1, 2, 3, 4, 5, 6, 7, 8, 9 or 10 nucleotides therefrom;
[1294] iv) the tail domain is at least 10, 15, 20, 25, 30, 35 or 40 nucleotides in length, e.g., it comprises at least 10, 15, 20, 25, 30, 35 or 40 nucleotides from a naturally occurring S. aureus, S. thermophilus, or N. meningitidis tail domain; or a sequence that differs by no more than 1, 2, 3, 4, 5, 6, 7, 8, 9 or 10 nucleotides therefrom; or
[1295] (v) the tail domain comprises 15, 20, 25, 30, 35, 40 nucleotides or all of the corresponding portions of a naturally occurring tail domain, e.g., a naturally occurring S. aureus, S. thermophilus, or N. meningitidis tail domain;
[1296] d) the gRNAs are configured such that, when hybridized to target nucleic acid, they are separated by 0-50, 0-100, 0-200, at least 10, at least 20, at least 30 or at least 50 nucleotides;
[1297] e) the breaks made by the first gRNA and second gRNA are on different strands; and
[1298] f) the PAMs are facing outwards.

[1299] In an embodiment, one or both of the gRNAs is configured such that it comprises properties: a and b(i). In an embodiment, one or both of the gRNAs is configured such that it comprises properties: a and b(ii). In an embodiment, one or both of the gRNAs is configured such that it comprises properties: a and b(iii). In an embodiment, one or both of the gRNAs configured such that it comprises properties: a and c. In an embodiment, one or both of the gRNAs is configured such that it comprises properties: a, b, and c. In an embodiment, one or both of the gRNAs is configured such that it comprises properties: a(i), b(i), and c(i). In an embodiment, one or both of the gRNAs is configured such that it comprises properties: a(i), b(i), and c(ii). In an embodiment, one or both of the gRNAs is configured such that it comprises properties: a(i), b(i), c, and d. In an embodiment, one or both of the gRNAs is configured such that it comprises properties: a(i), b(i), c, and e. In an embodiment, one or both of the gRNAs is configured such that it comprises properties: a(i), b(i), c, and f. In an embodiment, one or both of the gRNAs is configured such that it comprises properties: a(i), b(i), c, d, and e. In an embodiment, one or both of the gRNAs is configured such that it comprises properties: a(i), b(i), c, d, and f. In an embodiment, one or both of the gRNAs is configured such that it comprises properties: a(i), b(i), c, d, e, and f. In an embodiment, one or both of the gRNAs is configured such that it comprises properties: a(i), b(iii), and c(i). In an embodiment, one or both of the gRNAs is configured such that it comprises properties: a(i), b(iii), and c(ii). In an embodiment, one or both of the gRNAs is configured such that it comprises properties: a(i), b(iii), c, and d. In an embodiment, one or both of the gRNAs is configured such that it comprises properties: a(i), b(iii), c, and e. In an embodiment, one or both of the gRNAs is configured such that it comprises properties: a(i), b(iii), c, and f. In an embodiment, one or both of the gRNAs is configured such that it comprises properties: a(i), b(iii), c, d, and e. In an embodiment, one or both of the gRNAs is configured such that it comprises properties: a(i), b(iii), c, d, and f. In an embodiment, one or both of the gRNAs is configured such that it comprises properties: a(i), b(iii), c, d, e, and f.

[1300] In an embodiment, the gRNAs are used with a Cas9 nickase molecule having HNH activity, e.g., a Cas9 molecule having the RuvC activity inactivated, e.g., a Cas9 molecule having a mutation at D10, e.g., the D10A mutation.

[1301] In an embodiment, the gRNAs are used with a Cas9 nickase molecule having RuvC activity, e.g., a Cas9 molecule having the HNH activity inactivated, e.g., a Cas9 molecule having a mutation at H840, e.g., a H840A.

[1302] V.2 Non-Homologous End-Joining

[1303] Nuclease-induced non-homologous end-joining (NHEJ), for example alt-NHEJ or canonical NHEJ, can be used to target gene-specific knockouts (see FIG. 1). NHEJ, e.g., alt-NHEJ, can also be used to remove (e.g., delete) sequence in a gene of interest. In the methods for altering a cell or treating a subject by altering a cell described herein, the cell is contacted with a Cas9 molecule described herein in an amount and under conditions sufficient for NHEJ, e.g., alt-NHEJ, to occur. In an embodiment, a deletion is inserted into the nucleic acid of the cell, thereby altering the sequence of the nucleic acid of the cell. In one embodiment, Alt-NHEJ pathways include blunt EJ, MMEJ, and SD-MMEJ (see FIG. 1).

[1304] While not wishing to be bound by theory, it is believed that, in an embodiment, the genomic alterations associated with the methods described herein rely on nuclease-induced NHEJ, e.g., alt-NHEJ, and the error-prone nature of the alt-NHEJ repair pathway. NHEJ repairs a double-strand break in the DNA by joining together the two ends; however, generally, the original sequence is restored only if two compatible ends, exactly as they were formed by the double-strand break, are perfectly ligated. The DNA ends of the double-strand break are frequently the subject of enzymatic processing, resulting in the addition or removal of nucleotides, e.g., resection, at one or both strands, prior to rejoining of the ends. This results in the presence of insertion and/or deletion (indel) mutations in the DNA sequence at the site of the NHEJ repair. Two-thirds of these mutations typically alter the reading frame and, therefore, produce a non-functional protein. Additionally, mutations that maintain the reading frame, but which insert or delete a significant amount of sequence, can destroy functionality of the protein. This is locus dependent as mutations in critical functional domains are likely less tolerable than mutations in non-critical regions of the protein.

[1305] The indel mutations generated by NHEJ are unpredictable in nature; however, at a given break site certain indel sequences are favored and are over represented in the population, likely due to small regions of microhomology. The lengths of deletions can vary widely; most commonly in the 1-50 bp range, but they can easily reach greater than 100-200 bp. Insertions tend to be shorter and often include short duplications of the sequence immediately surrounding the break site. However, it is possible to obtain large insertions, and in these cases, the inserted sequence has often been traced to other regions of the genome or to plasmid DNA present in the cells.

[1306] Because NHEJ, e.g., alt-NHEJ, is a mutagenic process, it can also be used to delete small sequence motifs as long as the generation of a specific final sequence is not required. If a double-strand break is targeted near to a short target sequence, the deletion mutations caused by the NHEJ repair often span, and therefore remove, the unwanted nucleotides. For the deletion of larger DNA segments, introducing two double-strand breaks, one on each side of the sequence, can result in NHEJ between the ends with removal of the entire intervening sequence. Both of these approaches can be used to delete specific DNA sequences; however, the error-prone nature of NHEJ may still produce indel mutations at the site of repair.

[1307] Two distinct NHEJ pathways are described herein, canonical NHEJ and alternative NHEJ. Canonical NHEJ typically occurs when a double strand break has blunt, unresected ends that are ligation-competent. In some instances, minimal end processing, e.g., <5 nucleotide deletions or insertions, occurs, and the break ends are ligated thereby resulting in either correct (error-free) repair, or approximately 1-4 nucleotide insertions or deletions. Canonical NHEJ is dependent upon the KU70/80 and XRCC4/LigaseIV pathway for recognition of the break, minimal end processing, DNA synthesis, and ligation.

[1308] In contrast, alternative NHEJ is not dependent upon the KU70/80 and XRCC4/LigaseIV pathway and typically occurs when resection of more than 5 nucleotides at the break ends occurs. In some cases, resection reveals a short span, e.g., 5 to 25 nucleotides, of homologous sequence in the overhangs, also known as microhomologies. The microhomologies anneal and the intervening sequence on the single strands between the break and the annealed microhomology region is deleted. Accordingly, ALT-NHEJ typically results in longer stretches, e.g., greater than 5 nucleotides, of deleted sequence than canonical NHEJ.

[1309] Both double strand cleaving eaCas9 molecules and single strand, or nickase, eaCas9 molecules can be used in the methods and compositions described herein to generate NHEJ-mediated indels. NHEJ-mediated indels targeted to a gene, e.g., a coding region, e.g., an early coding region of a gene of interest can be used to knockout (i.e., eliminate protein expression of) a gene of interest. For example, early coding region of a gene of interest includes sequence immediately following a transcription start site, within a first exon of the coding sequence, or within 500 bp of the transcription start site (e.g., less than 500, 450, 400, 350, 300, 250, 200, 150, 100 or 50 bp).

[1310] V.3 Single-Strand Annealing

[1311] Single strand annealing (SSA) is a type of HDR-repair. Specifically, SSA repairs a double-strand break between two repeat sequences present in a target nucleic acid. Repeat sequences utilized by the SSA pathway are generally greater than 30 nucleotides in length. Resection at the break ends occurs to reveal repeat sequences on both strands of the target nucleic acid. After resection, single strand overhangs containing the repeat sequences are coated with RPA protein to prevent the repeats sequences from inappropriate annealing, e.g., to themselves. RAD52 binds to each of the repeat sequences on the overhangs and aligns the sequences to enable the annealing of the complementary repeat sequences. After annealing, the single-strand flaps of the overhangs are cleaved. New DNA synthesis fills in any gaps, and ligation restores the DNA duplex. As a result of the processing, the DNA sequence between the two repeats is deleted. The length of the deletion can depend on many factors including the location of the two repeats utilized, and the pathway or processivity of the resection.

[1312] SSA does not require a template nucleic acid to alter or correct a target nucleic acid sequence. Instead, the complementary repeat sequence is utilized.

### VI. Methods of Promoting an HDR Repair Pathway

[1313] This section describes the machinery involved in different DNA repair pathways, and ways of modulating that machinery. While not wishing the theory in this section to be binding, it is believed that in many cases, inhibition of the steps or factors involved in a first DNA repair pathway increases the likelihood that a lesion will be repaired by another DNA repair pathway (e.g., HDR, such as HR, alt-HR, and/or SSA). Additional details on the DNA repair machinery are found in Ciccia and Elledge (2010) MOL. CELL 40(2): 179-204.

[1314] To begin, the relationships between different DNA damage repair pathways are described.

[1315] When a cell encounters a DSB, it follows a two-step model. The first step is the choice between canonical NHEJ (sometimes abbreviated herein as C-NHEJ) which operates on blunt DNA ends (i.e., no resection), and the initiation of resection of the DNA at the site of the DSB. After the resection is engaged, the cell faces a choice between alternative non-homologous end-joining (Alt-NHEJ, which is a class of repair pathways that includes MMEJ) and HDR (which is a class of repair pathways that includes HR, alt-HR and SSA). KU70-80 is a protein complex that has affinity for double-strand breaks and it is one of the key factors that regulates canonical NHEJ, and it suppresses both HR and alt-NHEJ. The length of resection of the DNA and the state of the cell cycle have an important role in engaging HDR versus Alt-NHEJ. Specifically, longer resection is required for HDR (hundreds of nucleotides) whereas typically short resection is needed for Alt-NHEJ; HR is active in S and G2 instead Alt-NHEJ is active throughout the cell cycle.

[1316] Each pathway is described in more detail in the following sections and tables.

TABLE VI.1
Representative Targets in Damage Repair Pathways

| | | | Compound/siRNA/ |
|---|---|---|---|
| Inhibition of | Will promote | Target | gRNA/antiMiR |
| (A) | | | |
| Inhibition of components | Increase Resection: | 53 BP1 | siRNA/gRNA |
| of the DNA damage | Increase of ALT- | | Dominant negative |
| response that prevents | NHEJ, HDR. Balance | | peptide |
| resection at the Break | between ALT-NHEJ | RIf1 | siRNA/gRNA |
| promoting indirectly | and HDR will depend | PTIP | siRNA/gRNA |
| NHEJInhibition of | if there is homology | | |
| components of the DNA | (either the sister | | |
| damage response that | chromatin or the | | |
| prevents resection at the | donor) | | |
| Break promoting indirectly | | | |
| NHEJ + B3:C51 | | | |
| (B) | | | |
| Inhibition of Canonical | Increase Resection: | KU 70-80 | siRNA/gRNA |
| NHEJ | Increase of ALT- | DNApk | NU7441 |
| | NHEJ, HDR. Balance | | CC115 |
| | between ALT-NHEJ | | NK314 |
| | and HDR will depend | | Wortmannin |
| | if there is homology | | LY294002 |
| | (either the sister | | NU 7026 |
| | chromatin or the | | IC86621 |
| | donor) | | IC87102 |
| | | | IC87361 |
| | | | OK1035 |
| | | | SU11752 |
| | | | IC486241 |
| | | | Vaillin |
| | | Lig4 | SCR7 |
| | | XRCC4 | siRNA/gRNA |
| | | XLF | siRNA/gRNA |
| | | Artemis | siRNA/gRNA |
| (C) | | | |
| Inhibition of HR | Increase cNHEJ, ALT- | BRCA2 | siRNA/gRNA |
| | NHEJ/SSA and ALT- | BRCA1 | siRNA/gRNA |
| | HR | CtIP | siRNA/gRNA |
| | | | dominant negative |
| | | | protein |
| | | EXo1 | siRNA/gRNA |
| | | DNA2 | siRNA/gRNA |
| | | MRN | siRNA/gRNA |
| | | complex | |
| | | MRE11 | Mirin |
| | | | Telomelysin |
| | | | Resveratrol |
| | | | siRNA/gRNA |
| | | Rad50 | siRNA/gRNA |
| | | Nbs1 | siRNA/gRNA |
| | | Rad51 | B02 |
| | | | A03 |
| | | | RI-1 |
| | | | IBR2 |
| | | | siRNA/gRNA |
| (J) | | | |
| ALT-NHEJ | Increase of HDR: ALT- | XRCC1 | siRNA/gRNA |
| | HR, SSA, HR | Ligase I | siRNA/gRNA |
| | | Ligase III | siRNA/gRNA |
| | | Pol Theta | siRNA/gRNA |
| (D) | | | |
| Inhibition of | Increase of HDR: ALT- | Fbh1 | siRNA/gRNA |
| antirecombinant proteints | HR, SSA, HR | RTEL | siRNA/gRNA |
| | | PARI | siRNA/gRNA |
| | | Rap80 | siRNA/gRNA |
| | | miRNA | miR-155-5p-antiMiR |
| | | | miR-155-3p-antiMiR |
| | | | miR-545-5p-antiMiR |
| | | | miR-545-3p-antiMiR |
| | | | miR-107-antiMiR |
| | | | miR-1255-A-antiMiR |
| | | | miR-1255-B1-antiMiR |
| | | | miR-1255-B2-antiMiR |
| | | | miR-148-5p-antiMiR |
| | | | miR-148-3p-antiMiR |
| | | | miR-193-5p-antiMiR |
| | | | miR-193-3p-antiMiR |
| (E) | | | |
| Inhibition of Single Strand | Increase HR | Rad52 | AID 651668 |
| Annealing | | | siRNA/gRNA |
| | | ERCC1 | NSC 130813, |
| | | | siRNA/gRNA |
| | | XPF | NSC 130813 |
| | | | siRNA/gRNA |
| (F) | | | |
| Inhibition of Single Strand | Increase HDR | PARP | Olaparib, AZD2281, |
| Break Repair | | | KU-0059436 |
| | | | Iniparib, BSI-201 |
| | | | BMN 673 |
| | | | Rucaparib, |
| | | | (AG014699, PF- |
| | | | 01367338) |
| | | | Veliparib, ABT-888 |
| | | | CEP 9722 |
| | | | INO-1001 |
| | | | MK 4827 |
| | | | BGB-290 |
| | | | E701, GPI21016 |
| | | | MP-124 |
| | | | LT-673 |
| | | | NMS-P118 |
| | | | XAV939 |
| | | | 3-aminobenzamide |
| | | XRCC1 | siRNA/gRNA |
| (H) | | | |
| Inhibition of MMR | Increase HDR | Msh2 | siRNA/gRNA |
| | | | Cadmium (Cd(2+)) |
| | | Msh3 | siRNA/gRNA |
| | | Msh6 | siRNA/gRNA |
| | | | Cadmium (Cd(2+)) |
| | | Mlh1 | siRNA/gRNA |
| | | Pms2 | siRNA/gRNA |
| (I) | | | |
| Chromatin modifier | Increase HDR | Ezh2 | GSK343 |
| inhibitors | | | EPZ-6438 |
| | | | GSK2816126 |
| | | | SureCN6120847 |
| | | | EPZ005687 |
| | | HDAC- | Trichostatin A (TSA) |
| | | Class I | Sodium Butyrate (NaB) |
| | | HDAC- | Trichostatin A (TSA) |
| | | Class II | Sodium Butyrate (NaB) |
| | | Setd2 | siRNA/gRNA |
| | | KDM4A/ | siRNA/gRNA |
| | | JMJD2A | |
| Cell Cycle arrest in G2 | Increase HDR mostly | CDk1 | RO-3306 |
| | HR | | AZD 5438 |

### VI.1 Homology-Directed Repair (HDR)

[1317] HDR is one of at least three repair pathways that act on double-stranded breaks (DSB). Which of the four pathways ultimately repairs a given DSB is influenced by a number of factors, including the degree of resection at the break. HDR typically acts when there has been significant resection at the DSB, forming at least one single stranded portion of DNA. The other three DSB repair pathways (canonical NHEJ, and alt-NHEJ) are discussed below. In addition to repairing DSBs, HDR (or a pathway sharing some of the same machinery) can also repair nicks when a nick is converted to a double strand break, e.g., after replication.

[1318] In some cases, the break is recognized by PARP1/2. PARP1/2 competes with Ku binding, and PARP1/2 binding favors engagement of the HDR machinery. Ku binding, in contrast, favors canonical NHEJ, as described below.

[1319] The DSB is also recognized by the MRN complex which contains MRE11, RAD50, and NBS1. MRE11 has 3′ to 5′ exonuclease activity and endonuclease activity. MrE11 can form a complex with RAD50, which results in the increase of exonuclease activity. The second subunit, NBS1, recruits ATM to the break. Resection at the break is initiated by the BRCA1-C complex. In this complex, CtBP-interacting protein (CtIP, also known as Retinoblastoma binding protein 8, carboxy terminal binding protein-interacting protein, or RBBP8) has endonuclease activity and interacts with BRCA1 and MRN. An initial step in the resection pathway may occur when BRCA1 displaces 53BP1-RIF1, which would otherwise push the break into the canonical NHEJ pathway. Once MRN and CtIP are assembled, endonucleolytic cleavage of the 5′ ends of the DSB creates short single-stranded 3′ overhangs. Next, resection enters the processive stage due to the activities of EXO1 exonuclease (which has 3′ to 5′ exonuclease activity), and the Dna2 endonuclease. (Dna2 possesses several enzymatic activities, including 5′ to 3′ exonuclease activity, ATPase activity, and helicase activity.) The helicases RECQl, BLM, WRN, RTS, RECQ4, and RECQ5 are human helicases involved in HDR. WRN has 3′ to 5′ helicase activity and exonuclease activity. BLM participates in replication and repair, unwinding both single strand and double stranded DNA in the 3′ to 5′ direction. During repair, BLM may also be involved in 5′ end resection. RecQ protein-like 4 (RECQ4 or RECQL4) has 3′ to 5′ helicase activity. RecQ helicase-like (RECQL, RECQl, or RECQL1) is a member of the RecQ helicase family and has 3′ to 5′ helicase activity. Together, these pro-resection components favor engagement of the HDR pathway.

[1320] Resection leads to the formation of single stranded DNA regions. These regions are bound and stabilized by RPA, a heterotrimer comprising RPA1, RPA2, and RPA3. An extended single strand can be repaired by the HDR pathway as discussed in this section, such as the SSA pathway which is discussed below. In the HDR pathway, the RPA heterotrimer undergoes post-translational modification, specifically PP4-dependent dephosphorylation of RPA2 and sumolyation of RPA1. RPA binding to the ssDNA generates a signal that has multiple consequence such as activation of the DNA damage response and ultimately the engagement of BRCA2. BRCA2 then acts to promote the RPA displacement and the consequential Rad51 loading onto the resected ends. CHK1 phosphorylates RAD51, allowing it to be recruited to the break. The Rad51 filament is a key factor involved in the search for homology and in promoting the D-loop invasion.

[1321] Repair can then progress via different DNA crossover intermediates, i.e., via the synthesis-dependent strand annealing (SDSA) pathway or by formation of double Holliday junctions (dHJs). Briefly, SDSA involves a DNA polymerase which lengthens the invading strand, and the RTEL helicase. When a dHJ is formed, the following machinery participates: BLM/TOPO III which dissolves the structure, an endonuclease such as FEN1, MUS81/EME1, or SLX1/SLX4 which cleaves the structure. (The FEN1 enzyme recognizes the specific DNA structure of 5′ overhanging flap structures that occur in DNA repair and replication, e.g., processes 5′ ends of Okazaki fragment during lagging strand synthesis. FEN1 may also possess 5′ to 3′ exonuclease activity on nicked or gapped double stranded DNA.)

[1322] In some embodiments, HDR results in physical integration of the template nucleic acid (or a part of it) into the genome as part of the repair process. In other embodiments, HDR does not result in physical integration of a part of the template nucleic acid into the genome.

[1323] FA (fanconi anemia) proteins may cause cells to favor HDR over canonical NHEJ.

[1324] In some embodiments, the methods herein involve up-regulating an HDR pathway(s). For instance, the methods may involve modulating (e.g., stimulating or overexpressing) a component (e.g., exactly one component, or one or more components, e.g., two or three components) of an HDR pathway, e.g., a component of Table VI.2 or VI.1(C). This component may be selected from, e.g., the group consisting of a PARP, PARP1, PARP2, MRN complex, MRE11, RAD50, NBS1, ATM, BRCA2, BRCA1, BRCA1 complex, BRCA1-C complex, BRCA1-B complex, CtIP, BRCA1, EX01, BLM, RPA complex, RPA1, RPA2, RPA3, PP4, or RAD51. In another embodiment, the up-regulator of HDR is a dominant negative CtIP. A dominant negative CtIP promotes resection in G1 phase.

[1325] In some embodiments, the HDR-enhancer molecule is a polypeptide of Table VI.2 or VI.1(C), or a polypeptide that comprises at least 60, 70, 80, 81, 82, 83, 84, 85, 86, 87, 88, 89, 90, 91, 92, 93, 94, 95, 96, 97, 98, 99 or 100% homology with, or differs by no more than 50, 40, 30, 20, 15, 14, 13, 12, 11, 10, 9, 8, 7, 6, 5, 4, 3, 2, or 1, amino acid residues from a naturally occurring polypeptide of Table VI.2 or VI.1(C).

[1326] In some embodiments, the HDR enhancer comprises a PARP, PARP1, PARP2, member of a MRN complex, MRE11, RAD50, NBS1, BARD1, BRCA2, BRCA1, a member of a BRCA1 complex, a member of a BRCA1-C complex, a member of a BRCA1-B complex, CtIP, EX01, BLM, RECQl, WRN, RTS, RECQ5, RPA3, PP4, RAD51, BACH1, FANCJ, Topbp1, TOPO III, FEN1, MUS81, EME1, SLX1, SLX4, or a FA protein. In some embodiments, the HDR enhancer comprises at least 60, 70, 80, 81, 82, 83, 84, 85, 86, 87, 88, 89, 90, 91, 92, 93, 94, 95, 96, 97, 98, 99 or 100% homology with, or differs by no more than 50, 40, 30, 20, 15, 10, 9, 8, 7, 6, 5, 4, 3, 2, or 1, amino acid residues from a naturally occurring a PARP, PARP1, PARP2, a member of a MRN complex, MRE11, RAD50, NBS1, BARD1, BRCA2, BRCA1, a member of a BRCA1 complex, a member of a BRCA1-C complex, a member of a BRCA1-B complex, CtIP, EX01, BLM, RECQl, WRN, RTS, RECQ5, RPA3, PP4, RAD51, BACH1, FANCJ, Topbp1, TOPO III, FEN1, MUS81, EME1, SLX1, SLX4, a FA protein, or one of the proteins described herein, e.g., in Table VI.2.

[1327] In another embodiment, an HDR enhancer may be an HDR-enhancing gRNA as described herein.

TABLE VI.2
Factors that promote HDR

| Factor | Sequence |
|---|---|
| a PARP | — |
| PARP1 | MAESSDKLYRVEYAKSGRASCKKCSESIPKDSLRMAIMVQSPMFDGKVPHWYHFSCFWKVGHSIRHPDVE |
| | VDGFSELRWDDQQKVKKTAEAGGVTGKGQDGIGSKAEKTLGDFAAEYAKSNRSTCKGCMEKIEKGQVRLS |
| | KKMVDPEKPQLGMIDRWYHPGCFVKNREELGFRPEYSASQLKGFSLLATEDKEALKKQLPGVKSEGKRKG |
| | DEVDGVDEVAKKKSKKEKDKDSKLEKALKAQNDLIWNIKDELKKVCSTNDLKELLIFNKQQVPSGESAIL |
| | DRVADGMVFGALLPCEECSGQLVFKSDAYYCTGDVTAWTKCMVKTQTPNRKEWVTPKEFREISYLKKLKV |
| | KKQDRIFPPETSASVAATPPPSTASAPAAVNSSASADKPLSNMKILTLGKLSRNKDEVKAMIEKLGGKLT |
| | GTANKASLCISTKKEVEKMNKKMEEVKEANIRVVSEDFLQDVSASTKSLQELFLAHILSPWGAEVKAEPV |
| | EVVAPRGKSGAALSKKSKGQVKEEGINKSEKRMKLTLKGGAAVDPDSGLEHSAHVLEKGGKVFSATLGLV |
| | DIVKGTNSYYKLQLLEDDKENRYWIFRSWGRVGTVIGSNKLEQMPSKEDAIEHFMKLYEEKTGNAWHSKN |
| | FTKYPKKFYPLEIDYGQDEEAVKKLTVNPGTKSKLPKPVQDLIKMIFDVESMKKAMVEYEIDLQKMPLGK |
| | LSKRQIQAAYSILSEVQQAVSQGSSDSQILDLSNRFYTLIPHDFGMKKPPLLNNADSVQAKVEMLDNLLD |
| | IEVAYSLLRGGSDDSSKDPIDVNYEKLKTDIKVVDRDSEEAEIIRKYVKNTHATTHNAYDLEVIDIFKIE |
| | REGECQRYKPFKQLHNRRLLWHGSRTTNFAGILSQGLRIAPPEAPVTGYMFGKGIYFADMVSKSANYCHT |
| | SQGDPIGLILLGEVALGNMYELKHASHISKLPKGKHSVKGLGKTTPDPSANISLDGVDVPLGTGISSGVN |
| | DTSLLYNEYIVYDIAQVNLKYLLKLKFNFKTSLW (poly [ADP-ribose] polymerase 1 |
| | [Homo sapiens] CCDS 1554.1) (SEQ ID NO: 148) |
| PARP2 | MAARRRRSTGGGRARALNESKRVNNGNTAPEDSSPAKKTRRCQRQESKKMPVAGGKANKDRTEDKQDGMP |
| | GRSWASKRVSESVKALLLKGKAPVDPECTAKVGKAHVYCEGNDVYDVMLNQINLQFNNNKYYLIQLLEDD |
| | AQRNFSVWMRWGRVGKMGQHSLVACSGNLNKAKEIFQKKFLDKTKNNWEDREKFEKVPGKYDMLQMDYAT |
| | NTQDEEETKKEESLKSPLKPESQLDLRVQELIKLICNVQAMEEMMMEMKYNTKKAPLGKLTVAQIKAGYQ |
| | SLKKIEDCIRAGQHGRALMEACNEFYTRIPHDFGLRTPPLIRTQKELSEKIQLLEALGDIEIAIKLVKTE |
| | LQSPEHPLDQHYRNLHCALRPLDHESYEFKVISQYLQSTHAPTHSDYTMTLLDLFEVEKDGEKEAFREDL |
| | HNRMLLWHGSRMSNWVGILSHGLRIAPPEAPITGYMFGKGIYFADMSSKSANYCFASRLKNTGLLLLSEV |
| | ALGQCNELLEANPKAEGLLQGKHSTKGLGKMAPSSAHFVTLNGSTVPLGPASDTGILNPDGYTLNYNEYI |
| | VYNPNQVRMRYLLKVQFNFLQLW (poly [ADP-ribose] polymerase 2 isoform 2 |
| | [Homo sapiens] CCDS 41910.1) (SEQ ID NO: 149) |
| | MAARRRRSTGGGRARALNESKRVNNGNTAPEDSSPAKKTRRCQRQESKKMPVAGGKANKDRTEDKQDESV |
| | KALLLKGKAPVDPECTAKVGKAHVYCEGNDVYDVMLNQTNLQFNNNKYYLIQLLEDDAQRNFSVWMRWGR |
| | VGKMGQHSLVACSGNLNKAKEIFQKKFLDKTKNNWEDREKFEKVPGKYDMLQMDYATNTQDEEETKKEES |
| | LKSPLKPESQLDLRVQELIKLICNVQAMEEMMMEMKYNTKKAPLGKLTVAQIKAGYQSLKKIEDCIRAGQ |
| | HGRALMEACNEFYTRIPHDFGLRTPPLIRTQKELSEKIQLLEALGDIEIAIKLVKTELQSPEHPLDQHYR |
| | NLHCALRPLDHESYEFKVISQYLQSTHAPTHSDYTMTLLDLFEVEKDGEKEAFREDLHNRMLLWHGSRMS |
| | NWVGILSHGLRIAPPEAPITGYMFGKGIYFADMSSKSANYCFASRLKNTGLLLLSEVALGQCNELLEANP |
| | KAEGLLQGKHSTKGLGKMAPSSAHFVTLNGSTVPLGPASDTGILNPDGYTLNYNEYIVYNPNQVRMRYLL |
| | KVQFNFLQLW (poly [ADP-ribose] polymerase 2 isoform 1 [Homo sapiens] |
| | CCDS 45077.1) (SEQ ID NO: 150) |
| MRN complex | — |
| MRE11 | MSTADALDDENTFKILVATDIHLGFMEKDAVRGNDTFVTLDEILRLAQENEVDFILLGGD |
| | LFHENKPSRKTLHTCLELLRKYCMGDRPVQFEILSDQSVNFGFSKFPWVNYQDGNLNISI |
| | PVFSIHGNHDDPTGADALCALDILSCAGFVNHFGRSMSVEKIDISPVLLQKGSTKIALYG |
| | LGSIPDERLYRMFVNKKVTMLRPKEDENSWFNLFVIHQNRSKHGSTNFIPEQFLDDFIDL |
| | VIWGHEHECKIAPTKNEQQLFYISQPGSSVVTSLSPGEAVKKHVGLLRIKGRKMNMHKIP |
| | LHTVRQFFMEDIVLANHPDIFNPDNPKVTQAIQSFCLEKIEEMLENAERERLGNSHQPEK |
| | PLVRLRVDYSGGFEPFSVLRFSQKFVDRVANPKDIIHFFRHREQKEKTGEEINFGKLITK |
| | PSEGTTLRVEDLVKQYFQTAEKNVQLSLLTERGMGEAVQEFVDKEEKDAIEELVKYQLEK |
| | TQRFLKERHIDALEDKIDEEVRRFRETRQKNTNEEDDEVREAMTRARALRSQSEESASAF |
| | SADDLMSIDLAEQMANDSDDSISAATNKGRGRGRGRRGGRGQNSASRGGSQRGRAFKSTR |
| | QQPSRNVTTKNYSEVIEVDESDVEEDIFPTTSKTDQRWSSTSSSKIMSQSQVSKGVDFES |
| | SEDDDDDPFMNTSSLRRNRR (Mre11-isoform 2 CCDS 8298.1) (SEQ ID NO: 151) |
| | MSTADALDDENTFKILVATDIHLGFMEKDAVRGNDTFVTLDEILRLAQENEVDFILLGGD |
| | LFHENKPSRKTLHTCLELLRKYCMGDRPVQFEILSDQSVNFGFSKFPWVNYQDGNLNISI |
| | PVFSIHGNHDDPTGADALCALDILSCAGFVNHFGRSMSVEKIDISPVLLQKGSTKIALYG |
| | LGSIPDERLYRMFVNKKVTMLRPKEDENSWFNLFVIHQNRSKHGSTNFIPEQFLDDFIDL |
| | VIWGHEHECKIAPTKNEQQLFYISQPGSSVVTSLSPGEAVKKHVGLLRIKGRKMNMHKIP |
| | LHTVRQFFMEDIVLANHPDIFNPDNPKVTQAIQSFCLEKIEEMLENAERERLGNSHQPEK |
| | PLVRLRVDYSGGFEPFSVLRFSQKFVDRVANPKDIIHFFRHREQKEKTGEEINFGKLITK |
| | PSEGTTLRVEDLVKQYFQTAEKNVQLSLLTERGMGEAVQEFVDKEEKDAIEELVKYQLEK |
| | TQRFLKERHIDALEDKIDEEVRRFRETRQKNTNEEDDEVREAMTRARALRSQSEESASAF |
| | SADDLMSIDLAEQMANDSDDSISAATNKGRGRGRGRRGGRGQNSASRGGSQRGRADTGLE |
| | TSTRSRNSKTAVSASRNMSIIDAFKSTRQQPSRNVTTKNYSEVIEVDESDVEEDIFPTTS |
| | KTDQRWSSTSSSKIMSQSQVSKGVDFESSEDDDDDPFMNTSSLRRNRR (Mrell-isoform 1 |
| | CCDS8299.1) (SEQ ID NO: 152) |
| RAD50 | MSRIEKMSILGVRSFGIEDKDKQIITFFSPLTILVGPNGAGKTTIIECLKYICTGDFPPGTKGNTFVHDP |
| | KVAQETDVRAQIRLQFRDVNGELIAVQRSMVCTQKSKKTEFKTLEGVITRTKHGEKVSLSSKCAEIDREM |
| | ISSLGVSKAVLNNVIFCHQEDSNWPLSEGKALKQKFDEIFSATRYIKALETLRQVRQTQGQKVKEYQMEL |
| | KYLKQYKEKACEIRDQITSKEAQLTSSKEIVKSYENELDPLKNRLKEIEHNLSKIMKLDNEIKALDSRKK |
| | QMEKDNSELEEKMEKVFQGTDEQLNDLYHNHQRTVREKERKLVDCHRELEKLNKESRLLNQEKSELLVEQ |
| | GRLQLQADRHQEHIRARDSLIQSLATQLELDGFERGPFSERQIKNFHKLVRERQEGEAKTANQLMNDFAE |
| | KETLKQKQIDEIRDKKTGLGRIIELKSEILSKKQNELKNVKYELQQLEGSSDRILELDQELIKAERELSK |
| | AEKNSNVETLKMEVISLQNEKADLDRTLRKLDQEMEQLNHHTTTRTQMEMLTKDKADKDEQIRKIKSRHS |
| | DELTSLLGYFPNKKQLEDWLHSKSKEINQTRDRLAKLNKELASSEQNKNHINNELKRKEEQLSSYEDKLF |
| | DVCGSQDFESDLDRLKEEIEKSSKQRAMLAGATAVYSQFITQLTDENQSCCPVCQRVFQTEAELQEVISD |
| | LQSKLRLAPDKLKSTESELKKKEKRRDEMLGLVPMRQSIIDLKEKEIPELRNKLQNVNRDIQRLKNDIEE |
| | QETLLGTIMPEEESAKVCLTDVTIMERFQMELKDVERKIAQQAAKLQGIDLDRTVQQVNQEKQEKQHKLD |
| | TVSSKIELNRKLIQDQQEQIQHLKSTTNELKSEKLQISTNLQRRQQLEEQTVELSTEVQSLYREIKDAKE |
| | QVSPLETTLEKFQQEKEELINKKNTSNKIAQDKLNDIKEKVKNIHGYMKDIENYIQDGKDDYKKQKETEL |
| | NKVIAQLSECEKHKEKINEDMRLMRQDIDTQKIQERWLQDNLTLRKRNEELKEVEEERKQHLKEMGQMQV |
| | LQMKSEHQKLEENIDNIKRNHNLALGRQKGYEEEIIHFKKELREPQFRDAEEKYREMMIVMRTTELVNKD |
| | LDIYYKTLDQAIMKFHSMKMEEINKIIRDLWRSTYRGQDIEYIEIRSDADENVSASDKRRNYNYRVVMLK |
| | GDTALDMRGRCSAGQKVLASLIIRLALAETFCLNCGIIALDEPTTNLDRENIESLAHALVEIIKSRSQQR |
| | NFQLLVITHDEDFVELLGRSEYVEKFYRIKKNIDQCSEIVKCSVSSLGFNVH (Rad50 [Homo |
| | sapiens], CCDS 34233.1) (SEQ ID NO: 153) |
| NBS1 | MWKLLPAAGPAGGEPYRLLTGVEYVVGRKNCAILIENDQSISRNHAVLTANFSVTNLSQTDEIPVLTLKD |
| | NSKYGTFVNEEKMQNGFSRTLKSGDGITFGVFGSKFRIEYEPLVACSSCLDVSGKTALNQAILQLGGFTV |
| | NNWTEECTHLVMVSVKVTIKTICALICGRPIVKPEYFTEFLKAVESKKQPPQIESFYPPLDEPSIGSKNV |
| | DLSGRQERKQIFKGKTFIFLNAKQHKKLSSAVVFGGGEARLITEENEEEHNFFLAPGTCVVDTGITNSQT |
| | LIPDCQKKWIQSIMDMLQRQGLRPIPEAEIGLAVIFMTTKNYCDPQGHPSTGLKTTTPGPSLSQGVSVDE |
| | KLMPSAPVNTTTYVADTESEQADTWDLSERPKEIKVSKMEQKFRMLSQDAPTVKESCKTSSNNNSMVSNT |
| | LAKMRIPNYQLSPTKLPSINKSKDRASQQQQTNSIRNYFQPSTKKRERDEENQEMSSCKSARIETSCSLL |
| | EQTQPATPSLWKNKEQHLSENEPVDTNSDNNLFTDTDLKSIVKNSASKSHAAEKLRSNKKREMDDVAIED |
| | EVLEQLFKDTKPELEIDVKVQKQEEDVNVRKRPRMDIETNDTFSDEAVPESSKISQENEIGKKRELKEDS |
| | LWSAKEISNNDKLQDDSEMLPKKLLLTEFRSLVIKNSTSRNPSGINDDYGQLKNFKKFKKVTYPGAGKLP |
| | HIIGGSDLIAHHARKNTELEEWLRQEMEVQNQHAKEESLADDLFRYNPYLKRRR (NBS1 [Homo |
| | sapiens], CCDS 6249.1) (SEQ ID NO: 154) |
| BARD1 | MPDNRQPRNRQPRIRSGNEPRSAPAMEPDGRGAWAHSRAALDRLEKLLRCSRCTNILREPVCLGGCEHIF |
| | CSNCVSDCIGTGCPVCYTPAWIQDLKINRQLDSMIQLCSKLRNLLHDNELSDLKEDKPRKSLFNDAGNKK |
| | NSIKMWFSPRSKKVRYVVSKASVQTQPAIKKDASAQQDSYEFVSPSPPADVSERAKKASARSGKKQKKKT |
| | LAEINQKWNLEAEKEDGEFDSKEESKQKLVSFCSQPSVISSPQINGEIDLLASGSLTESECFGSLTEVSL |
| | PLAEQIESPDTKSRNEVVTPEKVCKNYLTSKKSLPLENNGKRGHHNRLSSPISKRCRTSILSTSGDFVKQ |
| | TVPSENIPLPECSSPPSCKRKVGGTSGRKNSNMSDEFISLSPGTPPSTLSSSSYRRVMSSPSAMKLLPNM |
| | AVKRNHRGETLLHIASIKGDIPSVEYLLQNGSDPNVKDHAGWTPLHEACNHGHLKVVELLLQHKALVNTT |
| | GYQNDSPLHDAAKNGHVDIVKLLLSYGASRNAVNIFGLRPVDYTDDESMKSLLLLPEKNESSSASHCSVM |
| | NTGQRRDGPLVLIGSGLSSEQQKMLSELAVILKAKKYTEFDSTVTHVVVPGDAVQSTLKCMLGILNGCWI |
| | LKFEWVKACLRRKVCEQEEKYEIPEGPRRSRLNREQLLPKLFDGCYFYLWGTFKHHPKDNLIKLVTAGGG |
| | QILSRKPKPDSDVTQTINTVAYHARPDSDQRFCTQYIIYEDLCNYHPERVRQGKVWKAPSSWFIDCVMSF |
| | ELLPLDS (BRCA1-associated RING domain protein 1 isoform 1 [Homo |
| | sapiens] CCDS 2397.1) (SEQ ID NO: 155) |
| | MPDNRQPRNRQPRIRSGNEPRSAPAMEPDGRGAWAHSRAALDRLEKLLRCSRCNCVSDCIGTGCPVCYTP |
| | AWIQDLKINRQLDSMIQLCSKLRNLLHDNELSDLKEDKPRKSLFNDAGNKKNSIKMWFSPRSKKVRYVVS |
| | KASVQTQPAIKKDASAQQDSYEFVSPSPPADVSERAKKASARSGKKQKKKTLAEINQKWNLEAEKEDGEF |
| | DSKEESKQKLVSFCSQPSVISSPQINGEIDLLASGSLTESECFGSLIEVSLPLAEQIESPDTKSRNEVVT |
| | PEKVCKNYLTSKKSLPLENNGKRGHHNRLSSPISKRCRTSILSTSGDFVKQTVPSENIPLPECSSPPSCK |
| | RKVGGTSGRKNSNMSDEFISLSPGTPPSTLSSSSYRRVMSSPSAMKLLPNMAVKRNHRGETLLHIASIKG |
| | DIPSVEYLLQNGSDPNVKDHAGWTPLHEACNHGHLKVVELLLQHKALVNTTGYQNDSPLHDAAKNGHVDI |
| | VKLLLSYGASRNAVNIFGLRPVDYTDDESMKSLLLLPEKNESSSASHCSVMNTGQRRDGPLVLIGSGLSS |
| | EQQKMLSELAVILKAKKYTEFDSTVIHVVVPGDAVQSTLKCMLGILNGCWILKFEWVKACLRRKVCEQEE |
| | KYEIPEGPRRSRLNREQLLPKLFDGCYFYLWGTFKHHPKDNLIKLVTAGGGQILSRKPKPDSDVTQTINT |
| | VAYHARPDSDQRFCTQYIIYEDLCNYHPERVRQGKVWKAPSSWFIDCVMSFELLPLDS (BRCA1- |
| | associated RING domain protein 1 isoform 2 [Homo sapiens] CCDS |
| | 74646.1) (SEQ ID NO: 156) |
| | MPDNRQPRNRQPRIRSGNEPRSAPAMEPDGRGAWAHSRAALDRLEKLLRCSRCINILREPVCLGGCEHIF |
| | CSNIFGLRPVDYTDDESMKSLLLLPEKNESSSASHCSVMNTGQRRDGPLVLIGSGLSSEQQKMLSELAVI |
| | LKAKKYTEFDSTVTHVVVPGDAVQSTLKCMLGILNGCWILKFEWVKACLRRKVCEQEEKYEIPEGPRRSR |
| | LNREQLLPKLFDGCYFYLWGTFKHHPKDNLIKLVTAGGGQILSRKPKPDSDVTQTINTVAYHARPDSDQR |
| | FCTQYIIYEDLCNYHPERVRQGKVWKAPSSWFIDCVMSFELLPLDS (BRCA1-associated RING |
| | domain protein 1 isoform 2 [Homo sapiens] CCDS 74647.1) (SEQ ID NO: |
| | 157) |
| | MPDNRQPRNRQPRIRSGNEPRSAPAMEPDGRGAWAHSRAALDRLEKLLRCSRCNIFGLRPVDYTDDESMK |
| | SLLLLPEKNESSSASHCSVMNTGQRRDGPLVLIGSGLSSEQQKMLSELAVILKAKKYTEFDSTVTHVVVP |
| | GDAVQSTLKCMLGILNGCWILKFEWVKACLRRKVCEQEEKYEIPEGPRRSRLNREQLLPKLFDGCYFYLW |
| | GTFKHHPKDNLIKLVTAGGGQILSRKPKPDSDVTQTINTVAYHARPDSDQRFCTQYIIYEDLCNYHPERV |
| | RQGKVWKAPSSWFIDCVMSFELLPLDS (BRCA1-associated RING domain protein 1 |
| | isoform 2 [Homo sapiens] CCDS 74645.1) (SEQ ID NO: 158) |
| | MPDNRQPRNRQPRIRSGNEPRSAPAMEPDGRGAWAHSRAALDRLEKLLRCSRCINILREPVCLGGCEHIF |
| | CSNCVSDCIGTGCPVCYTPAWIQDLKINRQLDSMIQLCSKLRNLLHDNELSGVKACLRRKVCEQEEKYEI |
| | PEGPRRSRLNREQLLPKLFDGCYFYLWGTFKHHPKDNLIKLVTAGGGQILSRKPKPDSDVTQTINTVAYH |
| | ARPDSDQRFCTQYIIYEDLCNYHPERVRQGKVWKAPSSWFIDCVMSFELLPLDS (BRCA1- |
| | associated RING domain protein 1 isoform 2 [Homo sapiens] CCDS |
| | 74648.1) (SEQ ID NO: 159) |
| BRCA2 | MPIGSKERPTFFEIFKTRCNKADLGPISLNWFEELSSEAPPYNSEPAEESEHKNNNYEPNLFKTPQRKPS |
| | YNQLASTPIIFKEQGLTLPLYQSPVKELDKFKLDLGRNVPNSRHKSLRTVKTKMDQADDVSCPLLNSCLS |
| | ESPVVLQCTHVIPQRDKSVVCGSLFHTPKFVKGRQTPKHISESLGAEVDPDMSWSSSLATPPILSSTVLI |
| | VRNEEASETVFPHDTTANVKSYFSNHDESLKKNDRFIASVTDSENTNQREAASHGFGKTSGNSFKVNSCK |
| | DHIGKSMPNVLEDEVYETVVDTSEEDSFSLCFSKCRTKNLQKVRTSKTRKKIFHEANADECEKSKNQVKE |
| | KYSFVSEVEPNDTDPLDSNVANQKPFESGSDKISKEVVPSLACEWSQLTLSGLNGAQMEKIPLLHISSCD |
| | QNISEKDLLDTENKRKKDFLTSENSLPRISSLPKSEKPLNEETVVNKRDEEQHLESHTDCILAVKQAISG |
| | TSPVASSFQGIKKSIFRIRESPKETFNASFSGHMTDPNFKKETEASESGLEIHTVCSQKEDSLCPNLIDN |
| | GSWPATTTQNSVALKNAGLISTLKKKTNKFIYAIHDETSYKGKKIPKDQKSELINCSAQFEANAFEAPLT |
| | FANADSGLLHSSVKRSCSQNDSEEPTLSLTSSFGTILRKCSRNETCSNNTVISQDLDYKEAKCNKEKLQL |
| | FITPEADSLSCLQEGQCENDPKSKKVSDIKEEVLAAACHPVQHSKVEYSDTDFQSQKSLLYDHENASTLI |
| | LTPTSKDVLSNLVMISRGKESYKMSDKLKGNNYESDVELTKNIPMEKNQDVCALNENYKNVELLPPEKYM |
| | RVASPSRKVQFNQNTNLRVIQKNQEETTSISKITVNPDSEELFSDNENNFVFQVANERNNLALGNTKELH |
| | ETDLTCVNEPIFKNSTMVLYGDTGDKQATQVSIKKDLVYVLAEENKNSVKQHIKMTLGQDLKSDISLNID |
| | KIPEKNNDYMNKWAGLLGPISNHSFGGSFRTASNKEIKLSEHNIKKSKMFFKDIEEQYPTSLACVEIVNT |
| | LALDNQKKLSKPQSINTVSAHLQSSVVVSDCKNSHITPQMLFSKQDFNSNHNLTPSQKAEITELSTILEE |
| | SGSQFEFTQFRKPSYILQKSTFEVPENQMTILKTTSEECRDADLHVIMNAPSIGQVDSSKQFEGTVEIKR |
| | KFAGLLKNDCNKSASGYLTDENEVGFRGFYSAHGTKLNVSTEALQKAVKLFSDIENISEETSAEVHPISL |
| | SSSKCHDSVVSMFKIENHNDKTVSEKNNKCQLILQNNIEMTTGTFVEEITENYKRNTENEDNKYTAASRN |
| | SHNLEFDGSDSSKNDTVCIHKDETDLLFTDQHNICLKLSGQFMKEGNTQIKEDLSDLTFLEVAKAQEACH |
| | GNTSNKEQLTATKTEQNIKDFETSDTFFQTASGKNISVAKESFNKIVNFFDQKPEELHNFSLNSELHSDI |
| | RKNKMDILSYEETDIVKHKILKESVPVGTGNQLVTFQGQPERDEKIKEPTLLGFHTASGKKVKIAKESLD |
| | KVKNLFDEKEQGTSEITSFSHQWAKTLKYREACKDLELACETIEITAAPKCKEMQNSLNNDKNLVSIETV |
| | VPPKLLSDNLCRQTENLKTSKSIFLKVKVHENVEKETAKSPATCYTNQSPYSVIENSALAFYTSCSRKTS |
| | VSQTSLLEAKKWLREGIFDGQPERINTADYVGNYLYENNSNSTIAENDKNHLSEKQDTYLSNSSMSNSYS |
| | YHSDEVYNDSGYLSKNKLDSGIEPVLKNVEDQKNTSFSKVISNVKDANAYPQTVNEDICVEELVTSSSPC |
| | KNKNAAIKLSISNSNNFEVGPPAFRIASGKIVCVSHETIKKVKDIFTDSFSKVIKENNENKSKICQTKIM |
| | AGCYEALDDSEDILHNSLDNDECSTHSHKVFADIQSEEILQHNQNMSGLEKVSKISPCDVSLETSDICKC |
| | SIGKLHKSVSSANTCGIFSTASGKSVQVSDASLQNARQVFSEIEDSTKQVFSKVLFKSNEHSDQLTREEN |
| | TAIRTPEHLISQKGFSYNVVNSSAFSGFSTASGKQVSILESSLHKVKGVLEEFDLIRTEHSLHYSPTSRQ |
| | NVSKILPRVDKRNPEHCVNSEMEKTCSKEFKLSNNLNVEGGSSENNHSIKVSPYLSQFQQDKQQLVLGTK |
| | VSLVENIHVLGKEQASPKNVKMEIGKTETFSDVPVKTNIEVCSTYSKDSENYFETEAVEIAKAFMEDDEL |
| | TDSKLPSHATHSLFTCPENEEMVLSNSRIGKRRGEPLILVGEPSIKRNLLNEFDRIIENQEKSLKASKST |
| | PDGTIKDRRLFMHHVSLEPITCVPFRTTKERQEIQNPNFTAPGQEFLSKSHLYEHLTLEKSSSNLAVSGH |
| | PFYQVSATRNEKMRHLITTGRPTKVFVPPFKTKSHFHRVEQCVRNINLEENRQKQNIDGHGSDDSKNKIN |
| | DNEIHQFNKNNSNQAVAVTFTKCEEEPLDLITSLQNARDIQDMRIKKKQRQRVFPQPGSLYLAKTSTLPR |
| | ISLKAAVGGQVPSACSHKQLYTYGVSKHCIKINSKNAESFQFHTEDYFGKESLWTGKGIQLADGGWLIPS |
| | NDGKAGKEEFYRALCDTPGVDPKLISRIWVYNHYRWIIWKLAAMECAFPKEFANRCLSPERVLLQLKYRY |
| | DTEIDRSRRSAIKKIMERDDTAAKTLVLCVSDIISLSANISETSSNKTSSADTQKVAIIELTDGWYAVKA |
| | QLDPPLLAVLKNGRLTVGQKIILHGAELVGSPDACTPLEAPESLMLKISANSTRPARWYTKLGFFPDPRP |
| | FPLPLSSLFSDGGNVGCVDVIIQRAYPIQWMEKTSSGLYIFRNEREEEKEAAKYVEAQQKRLEALFTKIQ |
| | EEFEEHEENTTKPYLPSRALTRQQVRALQDGAELYEAVKNAADPAYLEGYFSEEQLRALNNHRQMLNDKK |
| | QAQIQLEIRKAMESAEQKEQGLSRDVTTVWKLRIVSYSKKEKDSVILSIWRPSSDLYSLLTEGKRYRIYH |
| | LATSKSKSKSERANIQLAATKKTQYQQLPVSDEILFQIYQPREPLHFSKFLDPDFQPSCSEVDLIGFVVS |
| | VVKKTGLAPFVYLSDECYNLLAIKFWIDLNEDIIKPHMLIAASNLQWRPESKSGLLTLFAGDFSVFSASP |
| | KEGHFQETFNKMKNTVENIDILCNEAENKLMHILHANDPKWSTPTKDCTSGPYTAQIIPGTGNKLLMSSP |
| | NCEIYYQSPLSLCMAKRKSVSTPVSAQMTSKSCKGEKEIDDQKNCKKRRALDFLSRLPLPPPVSPICTFV |
| | SPAAQKAFQPPRSCGTKYETPIKKKELNSPQMTPFKKFNEISLLESNSIADEELALINTQALLSGSTGEK |
| | QFISVSESTRTAPTSSEDYLRLKRRCTTSLIKEQESSQASTEECEKNKQDTITTKKYI (breast |
| | cancer 2, early onset, isoform CRA_c [Homo sapiens] CCDS 9344.1) (SEQ |
| | ID NO: 160) |
| BRCA1 | MDLSALRVEEVQNVINAMQKILECPICLELIKEPVSTKCDHIFCKFCMLKLLNQKKGPSQCPLCKNDITK |
| | RSLQESTRFSQLVEELLKIICAFQLDTGLEYANSYNFAKKENNSPEHLKDEVSIIQSMGYRNRAKRLLQS |
| | EPENPSLQETSLSVQLSNLGTVRTLRTKQRIQPQKTSVYIELGSDSSEDTVNKATYCSVGDQELLQITPQ |
| | GTRDEISLDSAKKAACEFSETDVTNTEHHQPSNNDLNTTEKRAAERHPEKYQGSSVSNLHVEPCGTNTHA |
| | SSLQHENSSLLLTKDRMNVEKAEFCNKSKQPGLARSQHNRWAGSKETCNDRRTPSTEKKVDLNADPLCER |
| | KEWNKQKLPCSENPRDTEDVPWITLNSSIQKVNEWFSRSDELLGSDDSHDGESESNAKVADVLDVLNEVD |
| | EYSGSSEKIDLLASDPHEALICKSERVHSKSVESNIEDKIFGKTYRKKASLPNLSHVTENLIIGAFVTEP |
| | QIIQERPLTNKLKRKRRPTSGLHPEDFIKKADLAVQKTPEMINQGTNQTEQNGQVMNITNSGHENKTKGD |
| | SIQNEKNPNPIESLEKESAFKTKAEPISSSISNMELELNIHNSKAPKKNRLRRKSSTRHIHALELVVSRN |
| | LSPPNCTELQIDSCSSSEEIKKKKYNQMPVRHSRNLQLMEGKEPATGAKKSNKPNEQTSKRHDSDTFPEL |
| | KLTNAPGSFTKCSNTSELKEFVNPSLPREEKEEKLETVKVSNNAEDPKDLMLSGERVLQTERSVESSSIS |
| | LVPGTDYGTQESISLLEVSTLGKAKTEPNKCVSQCAAFENPKGLIHGCSKDNRNDTEGFKYPLGHEVNHS |
| | RETSIEMEESELDAQYLQNTFKVSKRQSFAPFSNPGNAEEECATFSAHSGSLKKQSPKVTFECEQKEENQ |
| | GKNESNIKPVQTVNITAGFPVVGQKDKPVDNAKCSIKGGSRFCLSSQFRGNETGLITPNKHGLLQNPYRI |
| | PPLFPIKSFVKTKCKKNLLEENFEEHSMSPEREMGNENIPSTVSTISRNNIRENVFKEASSSNINEVGSS |
| | TNEVGSSINEIGSSDENIQAELGRNRGPKLNAMLRLGVLQPEVYKQSLPGSNCKHPEIKKQEYEEVVQTV |
| | NTDFSPYLISDNLEQPMGSSHASQVCSETPDDLLDDGEIKEDTSFAENDIKESSAVFSKSVQKGELSRSP |
| | SPFTHTHLAQGYRRGAKKLESSEENLSSEDEELPCFQHLLFGKVNNIPSQSTRHSTVATECLSKNTEENL |
| | LSLKNSLNDCSNQVILAKASQEHHLSEETKCSASLFSSQCSELEDLTANTNTQDPFLIGSSKQMRHQSES |
| | QGVGLSDKELVSDDEERGTGLEENNQEEQSMDSNLGEAASGCESETSVSEDCSGLSSQSDILTTQQRDTM |
| | QHNLIKLQQEMAELEAVLEQHGSQPSNSYPSIISDSSALEDLRNPEQSTSEKAVLISQKSSEYPISQNPE |
| | GLSADKFEVSADSSTSKNKEPGVERSSPSKCPSLDDRWYMHSCSGSLQNRNYPSQEELIKVVDVEEQQLE |
| | ESGPHDLTETSYLPRQDLEGTPYLESGISLFSDDPESDPSEDRAPESARVGNIPSSTSALKVPQLKVAES |
| | AQSPAAAHTTDTAGYNAMEESVSREKPELTASTERVNKRMSMVVSGLTPEEFMLVYKFARKHHITLTNLI |
| | TEETTHVVMKTDAEFVCERTLKYFLGIAGGKWVVSYFWVIQSIKERKMLNEHDFEVRGDVVNGRNHQGPK |
| | RARESQDRKIFRGLEICCYGPFTNMPTDQLEWMVQLCGASVVKELSSFTLGTGVHPIVVVQPDAWTEDNG |
| | FHAIGQMCEAPVVIREWVLDSVALYQCQELDTYLIPQIPHSHY (breast cancer type 1 |
| | susceptibility protein isoform 1 [Homo sapiens] CCDS 11453.1) (SEQ ID |
| | NO: 161) |
| | MLKLLNQKKGPSQCPLCKNDITKRSLQESTRFSQLVEELLKIICAFQLDTGLEYANSYNFAKKENNSPEH |
| | LKDEVSIIQSMGYRNRAKRLLQSEPENPSLQETSLSVQLSNLGTVRTLRTKQRIQPQKTSVYIELGSDSS |
| | EDTVNKATYCSVGDQELLQITPQGTRDEISLDSAKKAACEFSETDVTNTEHHQPSNNDLNTTEKRAAERH |
| | PEKYQGSSVSNLHVEPCGTNTHASSLQHENSSLLLTKDRMNVEKAEFCNKSKQPGLARSQHNRWAGSKET |
| | CNDRRTPSTEKKVDLNADPLCERKEWNKQKLPCSENPRDTEDVPWITLNSSIQKVNEWFSRSDELLGSDD |
| | SHDGESESNAKVADVLDVLNEVDEYSGSSEKIDLLASDPHEALICKSERVHSKSVESNIEDKIFGKTYRK |
| | KASLPNLSHVTENLIIGAFVTEPQIIQERPLTNKLKRKRRPTSGLHPEDFIKKADLAVQKTPEMINQGTN |
| | QTEQNGQVMNITNSGHENKTKGDSIQNEKNPNPIESLEKESAFKTKAEPISSSISNMELELNIHNSKAPK |
| | KNRLRRKSSTRHIHALELVVSRNLSPPNCTELQIDSCSSSEEIKKKKYNQMPVRHSRNLQLMEGKEPATG |
| | AKKSNKPNEQTSKRHDSDTFPELKLTNAPGSFTKCSNTSELKEFVNPSLPREEKEEKLETVKVSNNAEDP |
| | KDLMLSGERVLQTERSVESSSISLVPGTDYGTQESISLLEVSTLGKAKTEPNKCVSQCAAFENPKGLIHG |
| | CSKDNRNDTEGFKYPLGHEVNHSRETSIEMEESELDAQYLQNTFKVSKRQSFAPFSNPGNAEEECATFSA |
| | HSGSLKKQSPKVIFECEQKEENQGKNESNIKPVQTVNITAGFPVVGQKDKPVDNAKCSIKGGSRFCLSSQ |
| | FRGNETGLITPNKHGLLQNPYRIPPLFPIKSFVKTKCKKNLLEENFEEHSMSPEREMGNENIPSTVSTIS |
| | RNNIRENVFKEASSSNINEVGSSTNEVGSSINEIGSSDENIQAELGRNRGPKLNAMLRLGVLQPEVYKQS |
| | LPGSNCKHPEIKKQEYEEVVQTVNTDFSPYLISDNLEQPMGSSHASQVCSETPDDLLDDGEIKEDTSFAE |
| | NDIKESSAVFSKSVQKGELSRSPSPFTHTHLAQGYRRGAKKLESSEENLSSEDEELPCFQHLLFGKVNNI |
| | PSQSTRHSTVATECLSKNTEENLLSLKNSLNDCSNQVILAKASQEHHLSEETKCSASLFSSQCSELEDLT |
| | ANTNTQDPFLIGSSKQMRHQSESQGVGLSDKELVSDDEERGTGLEENNQEEQSMDSNLGEAASGCESETS |
| | VSEDCSGLSSQSDILTTQQRDTMQHNLIKLQQEMAELEAVLEQHGSQPSNSYPSIISDSSALEDLRNPEQ |
| | STSEKAVLTSQKSSEYPISQNPEGLSADKFEVSADSSTSKNKEPGVERSSPSKCPSLDDRWYMHSCSGSL |
| | QNRNYPSQEELIKVVDVEEQQLEESGPHDLTETSYLPRQDLEGTPYLESGISLFSDDPESDPSEDRAPES |
| | ARVGNIPSSTSALKVPQLKVAESAQSPAAAHTTDTAGYNAMEESVSREKPELTASTERVNKRMSMVVSGL |
| | TPEEFMLVYKFARKHHITLTNLITEETTHVVMKTDAEFVCERTLKYFLGIAGGKWVVSYFWVTQSIKERK |
| | MLNEHDFEVRGDVVNGRNHQGPKRARESQDRKIFRGLEICCYGPFTNMPTDQLEWMVQLCGASVVKELSS |
| | FTLGTGVHPIVVVQPDAWTEDNGFHAIGQMCEAPVVTREWVLDSVALYQCQELDTYLIPQIPHSHY |
| | (breast cancer type 1 susceptibility protein isoform 2 [Homo sapiens] |
| | CCDS 11459.2) (SEQ ID NO: 162) |
| | MDLSALRVEEVQNVINAMQKILECPICLELIKEPVSTKCDHIFCKFCMLKLLNQKKGPSQCPLCKNDITK |
| | RSLQESTRFSQLVEELLKIICAFQLDTGLEYANSYNFAKKENNSPEHLKDEVSIIQSMGYRNRAKRLLQS |
| | EPENPSLQETSLSVQLSNLGTVRTLRTKQRIQPQKTSVYIELGSDSSEDTVNKATYCSVGDQELLQITPQ |
| | GTRDEISLDSAKKAACEFSETDVTNTEHHQPSNNDLNTTEKRAAERHPEKYQGSSVSNLHVEPCGTNTHA |
| | SSLQHENSSLLLTKDRMNVEKAEFCNKSKQPGLARSQHNRWAGSKETCNDRRTPSTEKKVDLNADPLCER |
| | KEWNKQKLPCSENPRDTEDVPWITLNSSIQKVNEWFSRSDELLGSDDSHDGESESNAKVADVLDVLNEVD |
| | EYSGSSEKIDLLASDPHEALICKSERVHSKSVESNIEDKIFGKTYRKKASLPNLSHVTENLIIGAFVTEP |
| | QIIQERPLTNKLKRKRRPTSGLHPEDFIKKADLAVQKTPEMINQGTNQTEQNGQVMNITNSGHENKTKGD |
| | SIQNEKNPNPIESLEKESAFKTKAEPISSSISNMELELNIHNSKAPKKNRLRRKSSTRHIHALELVVSRN |
| | LSPPNCTELQIDSCSSSEEIKKKKYNQMPVRHSRNLQLMEGKEPATGAKKSNKPNEQTSKRHDSDTFPEL |
| | KLTNAPGSFTKCSNTSELKEFVNPSLPREEKEEKLETVKVSNNAEDPKDLMLSGERVLQTERSVESSSIS |
| | LVPGTDYGTQESISLLEVSTLGKAKTEPNKCVSQCAAFENPKGLIHGCSKDNRNDTEGFKYPLGHEVNHS |
| | RETSIEMEESELDAQYLQNTFKVSKRQSFAPFSNPGNAEEECATFSAHSGSLKKQSPKVTFECEQKEENQ |
| | GKNESNIKPVQTVNITAGFPVVGQKDKPVDNAKCSIKGGSRFCLSSQFRGNETGLITPNKHGLLQNPYRI |
| | PPLFPIKSFVKTKCKKNLLEENFEEHSMSPEREMGNENIPSTVSTISRNNIRENVFKEASSSNINEVGSS |
| | TNEVGSSINEIGSSDENIQAELGRNRGPKLNAMLRLGVLQPEVYKQSLPGSNCKHPEIKKQEYEEVVQTV |
| | NTDFSPYLISDNLEQPMGSSHASQVCSETPDDLLDDGEIKEDTSFAENDIKESSAVFSKSVQKGELSRSP |
| | SPFTHTHLAQGYRRGAKKLESSEENLSSEDEELPCFQHLLFGKVNNIPSQSTRHSTVATECLSKNTEENL |
| | LSLKNSLNDCSNQVILAKASQEHHLSEETKCSASLFSSQCSELEDLTANTNTQDPFLIGSSKQMRHQSES |
| | QGVGLSDKELVSDDEERGTGLEENNQEEQSMDSNLGEAASGCESETSVSEDCSGLSSQSDILTTQQRDTM |
| | QHNLIKLQQEMAELEAVLEQHGSQPSNSYPSIISDSSALEDLRNPEQSTSEKDSHIHGQRNNSMFSKRPR |
| | EHISVLTSQKSSEYPISQNPEGLSADKFEVSADSSTSKNKEPGVERSSPSKCPSLDDRWYMHSCSGSLQN |
| | RNYPSQEELIKVVDVEEQQLEESGPHDLTETSYLPRQDLEGTPYLESGISLFSDDPESDPSEDRAPESAR |
| | VGNIPSSTSALKVPQLKVAESAQSPAAAHTTDTAGYNAMEESVSREKPELTASTERVNKRMSMVVSGLTP |
| | EEFMLVYKFARKHHITLTNLITEETTHVVMKTDAEFVCERTLKYFLGIAGGKWVVSYFWVTQSIKERKML |
| | NEHDFEVRGDVVNGRNHQGPKRARESQDRKIFRGLEICCYGPFTNMPTDQLEWMVQLCGASVVKELSSFT |
| | LGTGVHPIVVVQPDAWTEDNGFHAIGQMCEAPVVTREWVLDSVALYQCQELDTYLIPQIPHSHY |
| | (breast cancer type 1 susceptibility protein isoform 2 [Homo sapiens], |
| | CCDS 11456.2) (SEQ ID NO: 163) |
| | MDLSALRVEEVQNVINAMQKILECPICLELIKEPVSTKCDHIFCKFCMLKLLNQKKGPSQCPLCKNDITK |
| | RSLQESTRFSQLVEELLKIICAFQLDTGLEYANSYNFAKKENNSPEHLKDEVSIIQSMGYRNRAKRLLQS |
| | EPENPSLQETSLSVQLSNLGTVRTLRTKQRIQPQKTSVYIELGSDSSEDTVNKATYCSVGDQELLQITPQ |
| | GTRDEISLDSAKKAACEFSETDVTNTEHHQPSNNDLNTTEKRAAERHPEKYQGEAASGCESETSVSEDCS |
| | GLSSQSDILTIQQRDTMQHNLIKLQQEMAELEAVLEQHGSQPSNSYPSIISDSSALEDLRNPEQSTSEKV |
| | LTSQKSSEYPISQNPEGLSADKFEVSADSSTSKNKEPGVERSSPSKCPSLDDRWYMHSCSGSLQNRNYPS |
| | QEELIKVVDVEEQQLEESGPHDLTETSYLPRQDLEGTPYLESGISLFSDDPESDPSEDRAPESARVGNIP |
| | SSTSALKVPQLKVAESAQSPAAAHTTDTAGYNAMEESVSREKPELTASTERVNKRMSMVVSGLIPEEFML |
| | VYKFARKHHITLINLITEETTHVVMKTDAEFVCERTLKYFLGIAGGKWVVSYFWVIQSIKERKMLNEHDF |
| | EVRGDVVNGRNHQGPKRARESQDRKIFRGLEICCYGPFTNMPTDQLEWMVQLCGASVVKELSSFTLGTGV |
| | HPIVVVQPDAWTEDNGFHAIGQMCEAPVVIREWVLDSVALYQCQELDTYLIPQIPHSHY (breast |
| | cancer type 1 susceptibility protein isoform 2 [Homo sapiens] CCDS |
| | 11454.2) (SEQ ID NO: 164) |
| | MDLSALRVEEVQNVINAMQKILECPICLELIKEPVSTKCDHIFCKFCMLKLLNQKKGPSQCPLCKNDITK |
| | RSLQESTRFSQLVEELLKIICAFQLDTGLEYANSYNFAKKENNSPEHLKDEVSIIQSMGYRNRAKRLLQS |
| | EPENPSLQETSLSVQLSNLGTVRTLRTKQRIQPQKTSVYIELGSDSSEDTVNKATYCSVGDQELLQITPQ |
| | GTRDEISLDSAKKAACEFSETDVTNTEHHQPSNNDLNTTEKRAAERHPEKYQGEAASGCESETSVSEDCS |
| | GLSSQSDILTTQQRDTMQHNLIKLQQEMAELEAVLEQHGSQPSNSYPSIISDSSALEDLRNPEQSTSEKV |
| | LTSQKSSEYPISQNPEGLSADKFEVSADSSTSKNKEPGVERSSPSKCPSLDDRWYMHSCSGSLQNRNYPS |
| | QEELIKVVDVEEQQLEESGPHDLTETSYLPRQDLEGTPYLESGISLFSDDPESDPSEDRAPESARVGNIP |
| | SSTSALKVPQLKVAESAQSPAAAHTTDTAGYNAMEESVSREKPELTASTERVNKRMSMVVSGLIPEEFML |
| | VYKFARKHHITLINLITEETTHVVMKTDAEFVCERTLKYFLGIAGGKWVVSYFWVIQSIKERKMLNEHDF |
| | EVRGDVVNGRNHQGPKRARESQDRKIFRGLEICCYGPFTNMPTGCPPNCGCAARCLDRGQWLPCNWADV |
| | (breast cancer type 1 susceptibility protein isoform 2 [Homo sapiens] |
| | CCDS 11455.2) (SEQ ID NO: 165) |
| BRCA1-C complex | — |
| BRCA1-B complex | — |
| CtIP | MNISGSSCGSPNSADTSSDFKDLWTKLKECHDREVQGLQVKVTKLKQERILDAQRLEEFF |
| | TKNQQLREQQKVLHETIKVLEDRLRAGLCDRCAVTEEHMRKKQQEFENIRQQNLKLITEL |
| | MNERNTLQEENKKLSEQLQQKIENDQQHQAAELECEEDVIPDSPITAFSFSGVNRLRRKE |
| | NPHVRYIEQTHIKLEHSVCANEMRKVSKSSTHPQHNPNENEILVADTYDQSQSPMAKAHG |
| | TSSYTPDKSSFNLATVVAETLGLGVQEESETQGPMSPLGDELYHCLEGNHKKQPFEESTR |
| | NTEDSLRFSDSTSKTPPQEELPTRVSSPVFGATSSIKSGLDLNTSLSPSLLQPGKKKHLK |
| | TLPFSNTCISRLEKTRSKSEDSALFTHHSLGSEVNKIIIQSSNKQILINKNISESLGEQN |
| | RTEYGKDSNTDKHLEPLKSLGGRTSKRKKTEEESEHEVSCPQASFDKENAFPFPMDNQFS |
| | MNGDCVMDKPLDLSDRFSAIQRQEKSQGSETSKNKFRQVTLYEALKTIPKGFSSSRKASD |
| | GNCTLPKDSPGEPCSQECIILQPLNKCSPDNKPSLQIKEENAVFKIPLRPRESLETENVL |
| | DDIKSAGSHEPIKIQTRSDHGGCELASVLQLNPCRTGKIKSLQNNQDVSFENIQWSIDPG |
| | ADLSQYKMDVTVIDTKDGSQSKLGGETVDMDCTLVSETVLLKMKKQEQKGEKSSNEERKM |
| | NDSLEDMFDRTTHEEYESCLADSFSQAADEEEELSTATKKLHTHGDKQDKVKQKAFVEPY |
| | FKGDERETSLQNFPHIEVVRKKEERRKLLGHTCKECEIYYADMPAEEREKKLASCSRHRF |
| | RYIPPNTPENFWEVGFPSTQTCMERGYIKEDLDPCPRPKRRQPYNAIFSPKGKEQKT (CtIP- |
| | isoform 1 CCDS 11875.1) (SEQ ID NO: 166) |
| | MNISGSSCGSPNSADTSSDFKDLWTKLKECHDREVQGLQVKVTKLKQERILDAQRLEEFF |
| | TKNQQLREQQKVLHETIKVLEDRLRAGLCDRCAVTEEHMRKKQQEFENIRQQNLKLITEL |
| | MNERNTLQEENKKLSEQLQQKIENDQQHQAAELECEEDVIPDSPITAFSFSGVNRLRRKE |
| | NPHVRYIEQTHTKLEHSVCANEMRKVSKSSTHPQHNPNENEILVADTYDQSQSPMAKAHG |
| | TSSYTPDKSSFNLATVVAETLGLGVQEESETQGPMSPLGDELYHCLEGNHKKQPFEESTR |
| | NTEDSLRFSDSTSKTPPQEELPTRVSSPVFGATSSIKSGLDLNTSLSPSLLQPGKKKHLK |
| | TLPFSNTCISRLEKTRSKSEDSALFTHHSLGSEVNKIIIQSSNKQILINKNISESLGEQN |
| | RTEYGKDSNTDKHLEPLKSLGGRTSKRKKTEEESEHEVSCPQASFDKENAFPFPMDNQFS |
| | MNGDCVMDKPLDLSDRFSAIQRQEKSQGSETSKNKFRQVTLYEALKTIPKGFSSSRKASD |
| | GNCTLPKDSPGEPCSQECIILQPLNKCSPDNKPSLQIKEENAVFKIPLRPRESLETENVL |
| | DDIKSAGSHEPIKIQTRSDHGGCELASVLQLNPCRTGKIKSLQNNQDVSFENIQWSIDPG |
| | ADLSQYKMDVTVIDTKDGSQSKLGGETVDMDCTLVSETVLLKMKKQEQKGEKSSNEERKM |
| | NDSLEDMFDRTTHEEYESCLADSFSQAADEEEELSTATKKLHTHGDKQDKVKQKAFVEPY |
| | FKGDESIMQICQQKKEKRNWLPAQDTDSATFHPTHQRIFGKLVFLPLRLVWKEVILRKIL |
| | ILVLVQKDVSLTTQYFLQKARSRRHRR (CtIP-isoform 2 CCDS 11874.1) (SEQ ID |
| | NO: 167) |
| Dominant Negative CtIP | ATGAACATCTTGGGAAGCAGCTGTGGAAGCCCTAACTCTGCAGATACATCTAGTGACTTTAAGGACCTTT |
| (S327E, T847E, or | GGACAAAACTAAAAGAATGTCATGATAGAGAAGTACAAGGTTTACAAGTAAAAGTAACCAAGCTAAAACA |
| S327E + T847E) | GGAACGAATCTTAGATGCACAAAGACTAGAAGAATTCTTCACCAAAAATCAACAGCTGAGGGAACAGCAG |
| | AAAGTCCTTCATGAAACCATTAAAGTTTTAGAAGATCGGTTAAGAGCAGGCTTATGTGATCGCTGTGCAG |
| | TAACTGAAGAACATATGCGGAAAAAACAGCAAGAGTTTGAAAATATCCGGCAGCAGAATCTTAAACTTAT |
| | TACAGAACTTATGAATGAAAGGAATACTCTACAGGAAGAAAATAAAAAGCTTTCTGAACAACTCCAGCAG |
| | AAAATTGAGAATGATCAACAGCATCAAGCAGCTGAGCTTGAATGTGAGGAAGACGTTATTCCAGATTCAC |
| | CGATAACAGCCTTCTCATTTTCTGGCGTTAACCGGCTACGAAGAAAGGAGAACCCCCATGTCCGATACAT |
| | AGAACAAACACATACTAAATTGGAGCACTCTGTGTGTGCAAATGAAATGAGAAAAGTTTCCAAGTCTTCA |
| | ACTCATCCACAACATAATCCTAATGAAAATGAAATTCTAGTAGCTGACACTTATGACCAAAGTCAATCTC |
| | CAATGGCCAAAGCACATGGAACAAGCAGCTATACCCCTGATAAGTCATCTTTTAATTTAGCTACAGTTGT |
| | TGCTGAAACACTTGGACTTGGTGTTCAAGAAGAATCTGAAACTCAAGGTCCCATGAGCCCCCTTGGTGAT |
| | GAGCTCTACCACTGTCTGGAAGGAAATCACAAGAAACAGCCTTTTGAGGAATCTACAAGAAATACTGAAG |
| | ATAGTTTAAGATTTTCAGATTCTACTTCAAAGACTCCTCCTCAAGAAGAATTACCTACTCGAGTGTCATC |
| | TCCTGTATTTGGAGCTACCTCTAGTATCAAAAGTGGTTTAGATTTGAATACAAGTTTGTCCCCTTCTCTT |
| | TTACAGCCTGGGAAAAAAAAACATCTGAAAACACTCCCTTTTAGCAACACTTGTATATCTAGATTAGAAA |
| | AAACTAGATCAAAATCTGAAGATAGTGCCCTTTTCACACATCACAGTCTTGGGTCTGAAGTGAACAAGAT |
| | CATTATCCAGTCATCTAATAAACAGATACTTATAAATAAAAATATAAGTGAATCCCTAGGTGAACAGAAT |
| | AGGACTGAGTACGGTAAAGATTCTAACACTGATAAACATTTGGAGCCCCTGAAATCATTGGGAGGCCGAA |
| | CATCCAAAAGGAAGAAAACTGAGGAAGAAAGTGAACATGAAGTAAGCTGCCCCCAAGCTTCTTTTGATAA |
| | AGAAAATGCTTTCCCTTTTCCAATGGATAATCAGTTTTCCATGAATGGAGACTGTGTGATGGATAAACCT |
| | CTGGATCTGTCTGATCGATTTTCAGCTATTCAGCGTCAAGAGAAAAGCCAAGGAAGTGAGACTTCTAAAA |
| | ACAAATTTAGGCAAGTGACTCTTTATGAGGCTTTGAAGACCATTCCAAAGGGCTTTTCCTCAAGCCGTAA |
| | GGCCTCAGATGGCAACTGCACGTTGCCCAAAGATTCCCCAGGGGAGCCCTGTTCACAGGAATGCATCATC |
| | CTTCAGCCCTTGAATAAATGCTCTCCAGACAATAAACCATCATTACAAATAAAAGAAGAAAATGCTGTCT |
| | TTAAAATTCCTCTACGTCCACGTGAAAGTTTGGAGACTGAGAATGTTTTAGATGACATAAAGAGTGCTGG |
| | TTCTCATGAGCCAATAAAAATACAAACCAGGTCAGACCATGGAGGATGTGAACTTGCATCAGTTCTTCAG |
| | TTAAATCCATGTAGAACTGGTAAAATAAAGTCTCTACAAAACAACCAAGATGTATCCTTTGAAAATATCC |
| | AGTGGAGTATAGATCCGGGAGCAGACCTTTCTCAGTATAAAATGGATGTTACTGTAATAGATACAAAGGA |
| | TGGCAGTCAGTCAAAATTAGGAGGAGAGACAGTGGACATGGACTGTACATTGGTTAGTGAAACCGTTCTC |
| | TTAAAAATGAAGAAGCAAGAGCAGAAGGGAGAAAAAAGTTCAAATGAAGAAAGAAAAATGAATGATAGCT |
| | TGGAAGATATGTTTGATCGGACAACACATGAAGAGTATGAATCCTGTTTGGCAGACAGTTTCTCCCAAGC |
| | AGCAGATGAAGAGGAGGAATTGTCTACTGCCACAAAGAAACTACACACTCATGGTGATAAACAAGACAAA |
| | GTCAAGCAGAAAGCGTTTGTGGAGCCGTATTTTAAAGGTGATGAAAGAGAGACTAGCTTGCAAAATTTTC |
| | CTCATATTGAGGTGGTTCGGAAAAAAGAGGAGAGAAGAAAACTGCTTGGGCACACGTGTAAGGAATGTGA |
| | AATTTATTATGCAGATATGCCAGCAGAAGAAAGAGAAAAGAAATTGGCTTCCTGCTCAAGACACCGATTC |
| | CGCTACATTCCACCCAACACACCAGAGAATTTTTGGGAAGTTGGTTTTCCTTCCACTCAGACTTGTATGG |
| | AAAGAGGTTATATTAAGGAAGATCTTGATCCTTGTCCTCGTCCAAAAAGACGTCAGCCTTACAACGCAAT |
| | ATTTTCTCCAAAAGGCAAGGAGCAGAAGACATAA |
| | 327, 847 (SEQ ID NO: 168) |
| | MNILGSSCGSPNSADTSSDFKDLWTKLKECHDREVQGLQVKVTKLKQERILDAQRLEEFFTKNQQLREQQ |
| | KVLHETIKVLEDRLRAGLCDRCAVTEEHMRKKQQEFENIRQQNLKLITELMNERNTLQEENKKLSEQLQQ |
| | KIENDQQHQAAELECEEDVIPDSPITAFSFSGVNRLRRKENPHVRYIEQTHTKLEHSVCANEMRKVSKSS |
| | THPQHNPNENEILVADTYDQSQSPMAKAHGTSSYTPDKSSFNLATVVAETLGLGVQEESETQGPMSPLGD |
| | ELYHCLEGNHKKQPFEESTRNTEDSLRFSDSTSKTPPQEELPTRVSSPVFGATSSIKSGLDLNTSLSPSL |
| | LQPGKKKHLKTLPFSNTCISRLEKTRSKSEDSALFTHHSLGSEVNKIIIQSSNKQILINKNISESLGEQN |
| | RTEYGKDSNIDKHLEPLKSLGGRISKRKKTEEESEHEVSCPQASFDKENAFPFPMDNQFSMNGDCVMDKP |
| | LDLSDRFSAIQRQEKSQGSETSKNKFRQVTLYEALKTIPKGFSSSRKASDGNCTLPKDSPGEPCSQECII |
| | LQPLNKCSPDNKPSLQIKEENAVFKIPLRPRESLETENVLDDIKSAGSHEPIKIQTRSDHGGCELASVLQ |
| | LNPCRTGKIKSLQNNQDVSFENIQWSIDPGADLSQYKMDVTVIDTKDGSQSKLGGETVDMDCTLVSETVL |
| | LKMKKQEQKGEKSSNEERKMNDSLEDMFDRTTHEEYESCLADSFSQAADEEEELSTATKKLHTHGDKQDK |
| | VKQKAFVEPYFKGDERETSLQNFPHIEVVRKKEERRKLLGHICKECEIYYADMPAEEREKKLASCSRHRF |
| | RYIPPNTPENFWEVGFPSTQTCMERGYIKEDLDPCPRPKRRQPYNAIFSPKGKEQKTDYKDHDGDYKDHD |
| | I** (SEQ ID NO: 169) |
| | ATGAACATCTTGGGAAGCAGCTGTGGAAGCCCTAACTCTGCAGATACATCTAGTGACTTTAAGGACCTTT |
| | GGACAAAACTAAAAGAATGTCATGATAGAGAAGTACAAGGTTTACAAGTAAAAGTAACCAAGCTAAAACA |
| | GGAACGAATCTTAGATGCACAAAGACTAGAAGAATTCTTCACCAAAAATCAACAGCTGAGGGAACAGCAG |
| | AAAGTCCTTCATGAAACCATTAAAGTTTTAGAAGATCGGTTAAGAGCAGGCTTATGTGATCGCTGTGCAG |
| | TAACTGAAGAACATATGCGGAAAAAACAGCAAGAGTTTGAAAATATCCGGCAGCAGAATCTTAAACTTAT |
| | TACAGAACTTATGAATGAAAGGAATACTCTACAGGAAGAAAATAAAAAGCTTTCTGAACAACTCCAGCAG |
| | AAAATTGAGAATGATCAACAGCATCAAGCAGCTGAGCTTGAATGTGAGGAAGACGTTATTCCAGATTCAC |
| | CGATAACAGCCTTCTCATTTTCTGGCGTTAACCGGCTACGAAGAAAGGAGAACCCCCATGTCCGATACAT |
| | AGAACAAACACATACTAAATTGGAGCACTCTGTGTGTGCAAATGAAATGAGAAAAGTTTCCAAGTCTTCA |
| | ACTCATCCACAACATAATCCTAATGAAAATGAAATTCTAGTAGCTGACACTTATGACCAAAGTCAATCTC |
| | CAATGGCCAAAGCACATGGAACAAGCAGCTATACCCCTGATAAGTCATCTTTTAATTTAGCTACAGTTGT |
| | TGCTGAAACACTTGGACTTGGTGTTCAAGAAGAATCTGAAACTCAAGGTCCCATGAGCCCCCTTGGTGAT |
| | GAGCTCTACCACTGTCTGGAAGGAAATCACAAGAAACAGCCTTTTGAGGAATCTACAAGAAATACTGAAG |
| | ATAGTTTAAGATTTTCAGATTCTACTTCAAAGACTCCTCCTCAAGAAGAATTACCTACTCGAGTGTCATC |
| | TCCTGTATTTGGAGCTACCTCTAGTATCAAAAGTGGTTTAGATTTGAATACAAGTTTGTCCCCTTCTCTT |
| | TTACAGCCTGGGAAAAAAAAACATCTGAAAACACTCCCTTTTAGCAACACTTGTATATCTAGATTAGAAA |
| | AAACTAGATCAAAATCTGAAGATAGTGCCCTTTTCACACATCACAGTCTTGGGTCTGAAGTGAACAAGAT |
| | CATTATCCAGTCATCTAATAAACAGATACTTATAAATAAAAATATAAGTGAATCCCTAGGTGAACAGAAT |
| | AGGACTGAGTACGGTAAAGATTCTAACACTGATAAACATTTGGAGCCCCTGAAATCATTGGGAGGCCGAA |
| | CATCCAAAAGGAAGAAAACTGAGGAAGAAAGTGAACATGAAGTAAGCTGCCCCCAAGCTTCTTTTGATAA |
| | AGAAAATGCTTTCCCTTTTCCAATGGATAATCAGTTTTCCATGAATGGAGACTGTGTGATGGATAAACCT |
| | CTGGATCTGTCTGATCGATTTTCAGCTATTCAGCGTCAAGAGAAAAGCCAAGGAAGTGAGACTTCTAAAA |
| | ACAAATTTAGGCAAGTGACTCTTTATGAGGCTTTGAAGACCATTCCAAAGGGCTTTTCCTCAAGCCGTAA |
| | GGCCTCAGATGGCAACTGCACGTTGCCCAAAGATTCCCCAGGGGAGCCCTGTTCACAGGAATGCATCATC |
| | CTTCAGCCCTTGAATAAATGCTCTCCAGACAATAAACCATCATTACAAATAAAAGAAGAAAATGCTGTCT |
| | TTAAAATTCCTCTACGTCCACGTGAAAGTTTGGAGACTGAGAATGTTTTAGATGACATAAAGAGTGCTGG |
| | TTCTCATGAGCCAATAAAAATACAAACCAGGTCAGACCATGGAGGATGTGAACTTGCATCAGTTCTTCAG |
| | TTAAATCCATGTAGAACTGGTAAAATAAAGTCTCTACAAAACAACCAAGATGTATCCTTTGAAAATATCC |
| | AGTGGAGTATAGATCCGGGAGCAGACCTTTCTCAGTATAAAATGGATGTTACTGTAATAGATACAAAGGA |
| | TGGCAGTCAGTCAAAATTAGGAGGAGAGACAGTGGACATGGACTGTACATTGGTTAGTGAAACCGTTCTC |
| | TTAAAAATGAAGAAGCAAGAGCAGAAGGGAGAAAAAAGTTCAAATGAAGAAAGAAAAATGAATGATAGCT |
| | TGGAAGATATGTTTGATCGGACAACACATGAAGAGTATGAATCCTGTTTGGCAGACAGTTTCTCCCAAGC |
| | AGCAGATGAAGAGGAGGAATTGTCTACTGCCACAAAGAAACTACACACTCATGGTGATAAACAAGACAAA |
| | GTCAAGCAGAAAGCGTTTGTGGAGCCGTATTTTAAAGGTGATGAAAGAGAGACTAGCTTGCAAAATTTTC |
| | CTCATATTGAGGTGGTTCGGAAAAAAGAGGAGAGAAGAAAACTGCTTGGGCACACGTGTAAGGAATGTGA |
| | AATTTATTATGCAGATATGCCAGCAGAAGAAAGAGAAAAGAAATTGGCTTCCTGCTCAAGACACCGATTC |
| | CGCTACATTCCACCCAACGAACCAGAGAATTTTTGGGAAGTTGGTTTTCCTTCCACTCAGACTTGTATGG |
| | AAAGAGGTTATATTAAGGAAGATCTTGATCCTTGTCCTCGTCCAAAAAGACGTCAGCCTTACAACGCAAT |
| | ATTTTCTCCAAAAGGCAAGGAGCAGAAGACATAA (SEQ ID NO: 170) |
| | MNILGSSCGSPNSADTSSDFKDLWTKLKECHDREVQGLQVKVTKLKQERILDAQRLEEFFTKNQQLREQQ |
| | KVLHETIKVLEDRLRAGLCDRCAVTEEHMRKKQQEFENIRQQNLKLITELMNERNTLQEENKKLSEQLQQ |
| | KIENDQQHQAAELECEEDVIPDSPITAFSFSGVNRLRRKENPHVRYIEQTHTKLEHSVCANEMRKVSKSS |
| | THPQHNPNENEILVADTYDQSQSPMAKAHGTSSYTPDKSSFNLATVVAETLGLGVQEESETQGPMSPLGD |
| | ELYHCLEGNHKKQPFEESTRNTEDSLRFSDSTSKTPPQEELPTRVSSPVFGATSSIKSGLDLNTSLSPSL |
| | LQPGKKKHLKTLPFSNTCISRLEKTRSKSEDSALFTHHSLGSEVNKIIIQSSNKQILINKNISESLGEQN |
| | RTEYGKDSNTDKHLEPLKSLGGRTSKRKKTEEESEHEVSCPQASFDKENAFPFPMDNQFSMNGDCVMDKP |
| | LDLSDRFSAIQRQEKSQGSETSKNKFRQVTLYEALKTIPKGFSSSRKASDGNCTLPKDSPGEPCSQECII |
| | LQPLNKCSPDNKPSLQIKEENAVFKIPLRPRESLETENVLDDIKSAGSHEPIKIQTRSDHGGCELASVLQ |
| | LNPCRTGKIKSLQNNQDVSFENIQWSIDPGADLSQYKMDVTVIDTKDGSQSKLGGETVDMDCTLVSETVL |
| | LKMKKQEQKGEKSSNEERKMNDSLEDMFDRTTHEEYESCLADSFSQAADEEEELSTATKKLHTHGDKQDK |
| | VKQKAFVEPYFKGDERETSLQNFPHIEVVRKKEERRKLLGHTCKECEIYYADMPAEEREKKLASCSRHRF |
| | RYIPPNEPENFWEVGFPSTQTCMERGYIKEDLDPCPRPKRRQPYNAIFSPKGKEQKTDYKDHDGDYKDHD |
| | I* (SEQ ID NO: 171) |
| EXO1 | MGIQGLLQFIKEASEPIHVRKYKGQVVAVDTYCWLHKGAIACAEKLAKGEPTDRYVGFCM |
| | KFVNMLLSHGIKPILVFDGCTLPSKKEVERSRRERRQANLLKGKQLLREGKVSEARECFT |
| | RSINITHAMAHKVIKAARSQGVDCLVAPYEADAQLAYLNKAGIVQATITEDSDLLAFGCK |
| | KVILKMDQFGNGLEIDQARLGMCRQLGDVFTEEKFRYMCILSGCDYLSSLRGIGLAKACK |
| | VLRLANNPDIVKVIKKIGHYLKMNITVPEDYINGFIRANNTFLYQLVFDPIKRKLIPLNA |
| | YEDDVDPETLSYAGQYVDDSIALQIALGNKDINTFEQIDDYNPDTAMPAHSRSHSWDDKT |
| | CQKSANVSSIWHRNYSPRPESGTVSDAPQLKENPSTVGVERVISTKGLNLPRKSSIVKRP |
| | RSAELSEDDLLSQYSLSFTKKTKKNSSEGNKSLSFSEVFVPDLVNGPTNKKSVSTPPRTR |
| | NKFATFLQRKNEESGAVVVPGTRSRFFCSSDSTDCVSNKVSIQPLDETAVTDKENNLHES |
| | EYGDQEGKRLVDTDVARNSSDDIPNNHIPGDHIPDKATVFTDEESYSFESSKFTRTISPP |
| | TLGTLRSCFSWSGGLGDFSRTPSPSPSTALQQFRRKSDSPTSLPENNMSDVSQLKSEESS |
| | DDESHPLREEACSSQSQESGEFSLQSSNASKLSQCSSKDSDSEESDCNIKLLDSQSDQTS |
| | KLRLSHFSKKDTPLRNKVPGLYKSSSADSLSTTKIKPLGPARASGLSKKPASIQKRKHHN |
| | AENKPGLQIKLNELWKNFGFKKF (Exo1 Isoform 1 CCDS 44336.1) (SEQ ID |
| | NO: 172) |
| | MGIQGLLQFIKEASEPIHVRKYKGQVVAVDTYCWLHKGAIACAEKLAKGEPTDRYVGFCM |
| | KFVNMLLSHGIKPILVFDGCTLPSKKEVERSRRERRQANLLKGKQLLREGKVSEARECFT |
| | RSINITHAMAHKVIKAARSQGVDCLVAPYEADAQLAYLNKAGIVQATITEDSDLLAFGCK |
| | KVILKMDQFGNGLEIDQARLGMCRQLGDVFTEEKFRYMCILSGCDYLSSLRGIGLAKACK |
| | VLRLANNPDIVKVIKKIGHYLKMNITVPEDYINGFIRANNTFLYQLVFDPIKRKLIPLNA |
| | YEDDVDPETLSYAGQYVDDSIALQIALGNKDINTFEQIDDYNPDTAMPAHSRSHSWDDKT |
| | CQKSANVSSIWHRNYSPRPESGTVSDAPQLKENPSTVGVERVISTKGLNLPRKSSIVKRP |
| | RSAELSEDDLLSQYSLSFTKKTKKNSSEGNKSLSFSEVFVPDLVNGPTNKKSVSTPPRTR |
| | NKFATFLQRKNEESGAVVVPGTRSRFFCSSDSTDCVSNKVSIQPLDETAVTDKENNLHES |
| | EYGDQEGKRLVDTDVARNSSDDIPNNHIPGDHIPDKATVFTDEESYSFESSKFTRTISPP |
| | TLGTLRSCFSWSGGLGDFSRTPSPSPSTALQQFRRKSDSPTSLPENNMSDVSQLKSEESS |
| | DDESHPLREEACSSQSQESGEFSLQSSNASKLSQCSSKDSDSEESDCNIKLLDSQSDQTS |
| | KLRLSHFSKKDTPLRNKVPGLYKSSSADSLSTTKIKPLGPARASGLSKKPASIQKRKHHN |
| | AENKPGLQIKLNELWKNFGFKKDSEKLPPCKKPLSPVRDNIQLTPEAEEDIFNKPECGRV |
| | QRAIFQ (Exo1 Isoform 2 CCDS 1620.1) (SEQ ID NO: 173) |
| BLM | MAAVPQNNLQEQLERHSARTLNNKLSLSKPKFSGFIFKKKISSDNNVSVINVSVAKTPVL |
| | RNKDVNVIEDFSFSEPLPNTINQQRVKDFFKNAPAGQETQRGGSKSLLPDFLQTPKEVVC |
| | TTQNTPTVKKSRDTALKKLEFSSSPDSLSTINDWDDMDDFDTSETSKSFVTPPQSHFVRV |
| | STAQKSKKGKRNFFKAQLYTTNTVKTDLPPPSSESEQIDLTEEQKDDSEWLSSDVICIDD |
| | GPIAEVHINEDAQESDSLKTHLEDERDNSEKKKNLEEAELHSTEKVPCIEFDDDDYDTDF |
| | VPPSPEEIISASSSSSKCLSTLKDLDTSDRKEDVLSTSKDLLSKPEKMSMQELNPETSTD |
| | CDARQISLQQQLIHVMEHICKLIDTIPDDKLKLLDCGNELLQQRNIRRKLLTEVDFNKSD |
| | ASLLGSLWRYRPDSLDGPMEGDSCPTGNSMKELNFSHLPSNSVSPGDCLLTTTLGKTGFS |
| | ATRKNLFERPLFNTHLQKSFVSSNWAETPRLGKKNESSYFPGNVLTSTAVKDQNKHTASI |
| | NDLERETQPSYDIDNFDIDDFDDDDDWEDIMHNLAASKSSTAAYQPIKEGRPIKSVSERL |
| | SSAKTDCLPVSSTAQNINFSESIQNYTDKSAQNLASRNLKHERFQSLSFPHTKEMMKIFH |
| | KKFGLHNFRTNQLEAINAALLGEDCFILMPTGGGKSLCYQLPACVSPGVTVVISPLRSLI |
| | VDQVQKLTSLDIPATYLTGDKTDSEATNIYLQLSKKDPIIKLLYVTPEKICASNRLISTL |
| | ENLYERKLLARFVIDEAHCVSQWGHDFRQDYKRMNMLRQKFPSVPVMALTATANPRVQKD |
| | ILTQLKILRPQVFSMSFNRHNLKYYVLPKKPKKVAFDCLEWIRKHHPYDSGITYCLSRRE |
| | CDTMADTLQRDGLAALAYHAGLSDSARDEVQQKWINQDGCQVICATIAFGMGIDKPDVRF |
| | VIHASLPKSVEGYYQESGRAGRDGEISHCLLFYTYHDVTRLKRLIMMEKDGNHHTRETHF |
| | NNLYSMVHYCENITECRRIQLLAYFGENGFNPDFCKKHPDVSCDNCCKTKDYKTRDVTDD |
| | VKSIVRFVQEHSSSQGMRNIKHVGPSGRFTMNMLVDIFLGSKSAKIQSGIFGKGSAYSRH |
| | NAERLFKKLILDKILDEDLYINANDQATAYVMLGNKAQTVLNGNLKVDFMETENSSSVKK |
| | QKALVAKVSQREEMVKKCLGELTEVCKSLGKVFGVHYFNIFNTVTLKKLAESLSSDPEVL |
| | LQIDGVTEDKLEKYGAEVISVLQKYSEWTSPAEDSSPGISLSSSRGPGRSAAEELDEEIP |
| | VSSHYFASKTRNERKRKKMPASQRSKRRKTASSGSKAKGGSATCRKISSKTKSSSIIGSS |
| | SASHTSQATSGANSKLGIMAPPKPINRPFLKPSYAFS (BLM Isoform 1 CCDS 10363.1) |
| | (SEQ ID NO: 174) |
| | MAAVPQNNLQEQLERHSARTLNNKLSLSKPKFSGFIFKKKISSDNNVSVINVSVAKTPVL |
| | RNKDVNVIEDFSFSEPLPNTINQQRVKDFFKNAPAGQETQRGGSKSLLPDFLQTPKEVVC |
| | TTQNTPTVKKSRDTALKKLEFSSSPDSLSTINDWDDMDDFDTSETSKSFVTPPQSHFVRV |
| | STAQKSKKGKRNFFKAQLYTTNTVKTDLPPPSSESEQIDLTEEQKDDSEWLSSDVICIDD |
| | GPIAEVHINEDAQESDSLKTHLEDERDNSEKKKNLEEAELHSTEKVPCIEFDDDDYDTDF |
| | VPPSPEEIISASSSSSKCLSTLKDLDTSDRKEDVLSTSKDLLSKPEKMSMQELNPETSTD |
| | CDARQISLQQQLIHVMEHICKLIDTIPDDKLKLLDCGNELLQQRNIRRKLLTEVDFNKSD |
| | ASLLGSLWRYRPDSLDGPMEGDSCPTGNSMKELNFSHLPSNSVSPGDCLLTTTLGKTGFS |
| | ATRKNLFERPLFNTHLQKSFVSSNWAETPRLGKKNESSYFPGNVLTSTAVKDQNKHTASI |
| | NDLERETQPSYDIDNFDIDDFDDDDDWEDIMHNLAASKSSTAAYQPIKEGRPIKSVSERL |
| | SSAKTDCLPVSSTAQNINFSESIQNYTDKSAQNLASRNLKHERFQSLSFPHTKEMMKIFH |
| | KKFGLHNFRTNQLEAINAALLGEDCFILMPTGGGKSLCYQLPACVSPGVTVVISPLRSLI |
| | VDQVQKLTSLDIPATYLTGDKTDSEATNIYLQLSKKDPIIKLLYVTPEKICASNRLISTL |
| | ENLYERKLLARFVIDEAHCVSQWGHDFRQDYKRMNMLRQKFPSVPVMALTATANPRVQKD |
| | ILTQLKILRPQVFSMSFNRHNLKYYVLPKKPKKVAFDCLEWIRKHHPYDSGITYCLSRRE |
| | CDTMADTLQRDGLAALAYHAGLSDSARDEVQQKWINQDGCQVICATIAFGMGIDKPDVRF |
| | VIHASLPKSVEGYYQESGRAGRDGEISHCLLFYTYHDVTRLKRLIMMEKDGNHHTRETHF |
| | NNLYSMVHYCENITECRRIQLLAYFGENGFNPDFCKKHPDVSCDNCCKTKDYKTRDVTDD |
| | VKSIVRFVQEHSSSQGMRNIKHVGPSGRFTMNMLVDIFLESLSSDPEVLLQIDGVTEDKL |
| | EKYGAEVISVLQKYSEWTSPAEDSSPGISLSSSRGPGRSAAEELDEEIPVSSHYFASKTR |
| | NERKRKKMPASQRSKRRKTASSGSKAKGGSATCRKISSKTKSSSIIGSSSASHTSQATSG |
| | ANSKLGIMAPPKPINRPFLKPSYAFS (BLM Isoform 2 CCDS 73782.1) (SEQ ID |
| | NO: 175) |
| RECQ1 (also called | MASVSALTEELDSITSELHAVEIQIQELTERQQELIQKKKVLTKKIKQCLEDSDAGASNE |
| RECQL1) | YDSSPAAWNKEDFPWSGKVKDILQNVFKLEKFRPLQLETINVTMAGKEVFLVMPTGGGKS |
| | LCYQLPALCSDGFTLVICPLISLMEDQLMVLKQLGISATMLNASSSKEHVKWVHAEMVNK |
| | NSELKLIYVTPEKIAKSKMFMSRLEKAYEARRFTRIAVDEVHCCSQWGHDFRPDYKALGI |
| | LKRQFPNASLIGLTATATNHVLTDAQKILCIEKCFTFTASFNRPNLYYEVRQKPSNTEDF |
| | IEDIVKLINGRYKGQSGITYCFSQKDSEQVTVSLQNLGIHAGAYHANLEPEDKTTVHRKW |
| | SANEIQVVVATVAFGMGIDKPDVRFVIHHSMSKSMENYYQESGRAGRDDMKADCILYYGF |
| | GDIFRISSMVVMENVGQQKLYEMVSYCQNISKCRRVLMAQHFDEVWNSEACNKMCDNCCK |
| | DSAFERKNITEYCRDLIKILKQAEELNEKLTPLKLIDSWMGKGAAKLRVAGVVAPTLPRE |
| | DLEKIIAHFLIQQYLKEDYSFTAYATISYLKIGPKANLLNNEAHAITMQVTKSTQNSFRA |
| | ESSQTCHSEQGDKKMEEKNSGNFQKKAANMLQQSGSKNTGAKKRKIDDA (RECQL1 |
| | CCDS 31756.1) (SEQ ID NO: 176) |
| WRN | MSEKKLETTAQQRKCPEWMNVQNKRCAVEERKACVRKSVFEDDLPFLEFTGSIVYSYDAS |
| | DCSFLSEDISMSLSDGDVVGFDMEWPPLYNRGKLGKVALIQLCVSESKCYLFHVSSMSVF |
| | PQGLKMLLENKAVKKAGVGIEGDQWKLLRDFDIKLKNFVELTDVANKKLKCTETWSLNSL |
| | VKHLLGKQLLKDKSIRCSNWSKFPLTEDQKLYAATDAYAGFITYRNLEILDDTVQRFAIN |
| | KEEEILLSDMNKQLTSISEEVMDLAKHLPHAFSKLENPRRVSILLKDISENLYSLRRMII |
| | GSTNIETELRPSNNLNLLSFEDSTTGGVQQKQIREHEVLIHVEDETWDPTLDHLAKHDGE |
| | DVLGNKVERKEDGFEDGVEDNKLKENMERACLMSLDITEHELQILEQQSQEEYLSDIAYK |
| | STEHLSPNDNENDTSYVIESDEDLEMEMLKHLSPNDNENDTSYVIESDEDLEMEMLKSLE |
| | NLNSGTVEPTHSKCLKMERNLGLPTKEEEEDDENEANEGEEDDDKDFLWPAPNEEQVTCL |
| | KMYFGHSSFKPVQWKVIHSVLEERRDNVAVMATGYGKSLCFQYPPVYVGKIGLVISPLIS |
| | LMEDQVLQLKMSNIPACFLGSAQSENVLTDIKLGKYRIVYVTPEYCSGNMGLLQQLEADI |
| | GITLIAVDEAHCISEWGHDFRDSFRKLGSLKTALPMVPIVALTATASSSIREDIVRCLNL |
| | RNPQITCTGFDRPNLYLEVRRKTGNILQDLQPFLVKTSSHWEFEGPTIIYCPSRKMTQQV |
| | TGELRKLNLSCGTYHAGMSFSTRKDIHHRFVRDEIQCVIATIAFGMGINKADIRQVIHYG |
| | APKDMESYYQEIGRAGRDGLQSSCHVLWAPADINLNRHLLTEIRNEKFRLYKLKMMAKME |
| | KYLHSSRCRRQIILSHFEDKQVQKASLGIMGTEKCCDNCRSRLDHCYSMDDSEDTSWDFG |
| | PQAFKLLSAVDILGEKFGIGLPILFLRGSNSQRLADQYRRHSLFGTGKDQTESWWKAFSR |
| | QLITEGFLVEVSRYNKFMKICALTKKGRNWLHKANTESQSLILQANEELCPKKLLLPSSK |
| | TVSSGTKEHCYNQVPVELSTEKKSNLEKLYSYKPCDKISSGSNISKKSIMVQSPEKAYSS |
| | SQPVISAQEQETQIVLYGKLVEARQKHANKMDVPPAILATNKILVDMAKMRPTTVENVKR |
| | IDGVSEGKAAMLAPLLEVIKHFCQTNSVQTDLFSSTKPQEEQKTSLVAKNKICTLSQSMA |
| | ITYSLFQEKKMPLKSIAESRILPLMTIGMHLSQAVKAGCPLDLERAGLTPEVQKIIADVI |
| | RNPPVNSDMSKISLIRMLVPENIDTYLIHMAIEILKHGPDSGLQPSCDVNKRRCFPGSEE |
| | ICSSSKRSKEEVGINTETSSAERKRRLPVWFAKGSDTSKKLMDKTKRGGLFS (WRN |
| | CCDS 6082.1) (SEQ ID NO: 177) |
| RTS (also called | MERLRDVRERLQAWERAFRRQRGRRPSQDDVEAAPEETRALYREYRTLKRTTGQAGGGLRSSESLPAAAE |
| RECQ4) | EAPEPRCWGPHLNRAATKSPQSTPGRSRQGSVPDYGQRLKANLKGTLQAGPALGRRPWPLGRASSKASTP |
| | KPPGTGPVPSFAEKVSDEPPQLPEPQPRPGRLQHLQASLSQRLGSLDPGWLQRCHSEVPDFLGAPKACRP |
| | DLGSEESQLLIPGESAVLGPGAGSQGPEASAFQEVSIRVGSPQPSSSGGEKRRWNEEPWESPAQVQQESS |
| | QAGPPSEGAGAVAVEEDPPGEPVQAQPPQPCSSPSNPRYHGLSPSSQARAGKAEGTAPLHIFPRLARHDR |
| | GNYVRLNMKQKHYVRGRALRSRLLRKQAWKQKWRKKGECFGGGGATVTTKESCFLNEQFDHWAAQCPRPA |
| | SEEDTDAVGPEPLVPSPQPVPEVPSLDPTVLPLYSLGPSGQLAETPAEVFQALEQLGHQAFRPGQERAVM |
| | RILSGISTLLVLPTGAGKSLCYQLPALLYSRRSPCLTLVVSPLLSLMDDQVSGLPPCLKAACIHSGMTRK |
| | QRESVLQKIRAAQVHVLMLTPEALVGAGGLPPAAQLPPVAFACIDEAHCLSQWSHNFRPCYLRVCKVLRE |
| | RMGVHCFLGLTATATRRTASDVAQHLAVAEEPDLHGPAPVPTNLHLSVSMDRDTDQALLTLLQGKRFQNL |
| | DSIIIYCNRREDTERIAALLRTCLHAAWVPGSGGRAPKTTAEAYHAGMCSRERRRVQRAFMQGQLRVVVA |
| | TVAFGMGLDRPDVRAVLHLGLPPSFESYVQAVGRAGRDGQPAHCHLFLQPQGEDLRELRRHVHADSTDFL |
| | AVKRLVQRVFPACTCTCTRPPSEQEGAVGGERPVPKYPPQEAEQLSHQAAPGPRRVCMGHERALPIQLTV |
| | QALDMPEEAIETLLCYLELHPHHWLELLATTYTHCRLNCPGGPAQLQALAHRCPPLAVCLAQQLPEDPGQ |
| | GSSSVEFDMVKLVDSMGWELASVRRALCQLQWDHEPRTGVRRGTGVLVEFSELAFHLRSPGDLTAEEKDQ |
| | ICDFLYGRVQARERQALARLRRTFQAFHSVAFPSCGPCLEQQDEERSTRLKDLLGRYFEEEEGQEPGGME |
| | DAQGPEPGQARLQDWEDQVRCDIRQFLSLRPEEKFSSRAVARIFHGIGSPCYPAQVYGQDRRFWRKYLHL |
| | SFHALVGLATEELLQVAR (RECQ4, CCDS 75804.1) (SEQ ID NO: 178) |
| RECQ5 | MSSHHTTFPFDPERRVRSTLKKVFGFDSFKTPLQESATMAVVKGNKDVFVCMPTGAGKSLCYQLPALLAK |
| | GITIVVSPLIALIQDQVDHLLTLKVRVSSLNSKLSAQERKELLADLEREKPQTKILYITPEMAASSSFQP |
| | TLNSLVSRHLLSYLVVDEAHCVSQWGHDFRPDYLRLGALRSRLGHAPCVALTATATPQVQEDVFAALHLK |
| | KPVAIFKTPCFRANLFYDVQFKELISDPYGNLKDFCLKALGQEADKGLSGCGIVYCRTREACEQLAIELS |
| | CRGVNAKAYHAGLKASERTLVQNDWMEEKVPVIVATISFGMGVDKANVRFVAHWNIAKSMAGYYQESGRA |
| | GRDGKPSWCRLYYSRNDRDQVSFLIRKEVAKLQEKRGNKASDKATIMAFDALVTFCEELGCRHAAIAKYF |
| | GDALPACAKGCDHCQNPTAVRRRLEALERSSSWSKTCIGPSQGNGFDPELYEGGRKGYGDFSRYDEGSGG |
| | SGDEGRDEAHKREWNLFYQKQMQLRKGKDPKIEEFVPPDENCPLKEASSRRIPRLTVKAREHCLRLLEEA |
| | LSSNRQSTRTADEADLRAKAVELEHETFRNAKVANLYKASVLKKVADIHRASKDGQPYDMGGSAKSCSAQ |
| | AEPPEPNEYDIPPASHVYSLKPKRVGAGFPKGSCPFQTATELMETTRIREQAPQPERGGEHEPPSRPCGL |
| | LDEDGSEPLPGPRGEVPGGSAHYGGPSPEKKAKSSSGGSSLAKGRASKKQQLLATAAHKDSQSIARFFCR |
| | RVESPALLASAPEAEGACPSCEGVQGPPMAPEKYTGEEDGAGGHSPAPPQTEECLRERPSTCPPRDQGTP |
| | EVQPTPAKDTWKGKRPRSQQENPESQPQKRPRPSAKPSVVAEVKGSVSASEQGTLNPTAQDPFQLSAPGV |
| | SLKEAANVVVKCLTPFYKEGKFASKELFKGFARHLSHLLTQKTSPGRSVKEEAQNLIRHFFHGRARCESE |
| | ADWHGLCGPQR (ATP-dependent DNA helicase Q5 isoform 1 [Homo sapiens], |
| | CCDS 42380.1) (SEQ ID NO: 179) |
| | MSSHHTTFPFDPERRVRSTLKKVFGFDSFKTPLQESATMAVVKGNKDVFVCMPTGAGKSLCYQLPALLAK |
| | GITIVVSPLIALIQDQVDHLLTLKVRVSSLNSKLSAQERKELLADLEREKPQTKILYITPEMAASSSFQP |
| | TLNSLVSRHLLSYLVVDEAHCVSQWGHDFRPDYLRLGALRSRLGHAPCVALTATATPQVQEDVFAALHLK |
| | KPVAIFKTPCFRANLFYDVQFKELISDPYGNLKDFCLKALGQEADKGLSGCGIVYCRTREACEQLAIELS |
| | CRGVNAKAYHAGLKASERTLVQNDWMEEKVPVIVATISFGMGVDKANVRFVAHWNIAKSMAGYYQESGRA |
| | GRDGKPSWCRLYYSRNDRDQVSFLIRKEVAKLQEKRGNKASDKATIMAFDALVTFCEELGRWGRGHGKSL |
| | RAAWCSQVVSRHAEL (ATP-dependent DNA helicase Q5 isoform 2 [Homo |
| | sapiens], CCDS 32735.1) (SEQ ID NO: 180) |
| | MSSHHTTFPFDPERRVRSTLKKVFGFDSFKTPLQESATMAVVKGNKDVFVCMPTGAGKSLCYQLPALLAK |
| | GITIVVSPLIALIQDQVDHLLTLKVRVSSLNSKLSAQERKELLADLEREKPQTKILYITPEMAASSSFQP |
| | TLNSLVSRHLLSYLVVDEAHCVSQWGHDFRPDYLRLGALRSRLGHAPCVALTATATPQVQEDVFAALHLK |
| | KPVAIFKTPCFRANLFYDVQFKELISDPYGNLKDFCLKALGQEADKGLSGCGIVYCRTREACEQLAIELS |
| | CRGVNAKAYHAGLKASERTLVQNDWMEEKVPVIVATISFGMGVDKANVRFVAHWNIAKSMAGYYQESGRA |
| | GRDGKPSWCRLYYSRNDRDQVSFLIRKEVAKLQEKRGNKASDKATIMAFDALVTFCEELG (CCDS |
| | 45777.1) (SEQ ID NO: 181) |
| RPA3 | MVDMMDLPRSRINAGMLAQFIDKPVCFVGRLEKIHPTGKMFILSDGEGKNGTIELMEPLDEEISGIVEVV |
| | GRVTAKATILCTSYVQFKEDSHPFDLGLYNEAVKIIHDFPQFYPLGIVQHD (replication |
| | protein A3, 14 kDa, isoform CRA_a [Homo sapiens], CCDS 5356.1) (SEQ ID |
| | NO: 182) |
| PP4 | MAEISDLDRQIEQLRRCELIKESEVKALCAKAREILVEESNVQRVDSPVTVCGDIHGQFYDLKELFRVGG |
| | DVPETNYLFMGDFVDRGFYSVETFLLLLALKVRYPDRITLIRGNHESRQITQVYGFYDECLRKYGSVTVW |
| | RYCTEIFDYLSLSAIIDGKIFCVHGGLSPSIQTLDQIRTIDRKQEVPHDGPMCDLLWSDPEDTTGWGVSP |
| | RGAGYLFGSDVVAQFNAANDIDMICRAHQLVMEGYKWHFNETVLTVWSAPNYCYRCGNVAAILELDEHLQ |
| | KDFIIFEAAPQETRGIPSKKPVADYFL (PPP4C protein phosphatase 4, catalytic |
| | subunit, CCDS 10669.1) (SEQ ID NO: 183) |
| RAD51 | MAMQMQLEANADTSVEEESFGPQPISRLEQCGINANDVKKLEEAGFHTVEAVAYAPKKELINIKGISEAK |
| | ADKILAEAAKLVPMGFTTATEFHQRRSEIIQITTGSKELDKLLQGGIETGSITEMFGEFRTGKTQICHTL |
| | AVTCQLPIDRGGGEGKAMYIDTEGTFRPERLLAVAERYGLSGSDVLDNVAYARAFNTDHQTQLLYQASAM |
| | MVESRYALLIVDSATALYRTDYSGRGELSARQMHLARFLRMLLRLADEFGVAVVITNQVVAQVDGAAMFA |
| | ADPKKPIGGNITAHASTTRLYLRKGRGETRICKIYDSPCLPEAEAMFAINADGVGDAKD (RAD51 |
| | [Homo sapiens], CCDS 10062.1) (SEQ ID NO: 184) |
| | MAMQMQLEANADTSVEEESFGPQPISRLEQCGINANDVKKLEEAGFHTVEAVAYAPKKELINIKGISEAK |
| | ADKILTESRSVARLECNSVILVYCTLRLSGSSDSPASASRVVGTTGGIETGSITEMFGEFRTGKTQICHT |
| | LAVTCQLPIDRGGGEGKAMYIDTEGTFRPERLLAVAERYGLSGSDVLDNVAYARAFNTDHQTQLLYQASA |
| | MMVESRYALLIVDSATALYRTDYSGRGELSARQMHLARFLRMLLRLADEFGVAVVITNQVVAQVDGAAMF |
| | AADPKKPIGGNITAHASTTRLYLRKGRGETRICKIYDSPCLPEAEAMFAINADGVGDAKD (RAD51 |
| | [Homo sapiens], CCDS 53931.1) (SEQ ID NO: 185) |
| | MAMQMQLEANADTSVEEESFGPQPISRLEQCGINANDVKKLEEAGFHTVEAVAYAPKKELINIKGISEAK |
| | ADKILAEAAKLVPMGFTTATEFHQRRSEIIQITTGSKELDKLLQGGIETGSITEMFGEFRTGKTQICHTL |
| | AVTCQLPIDRGGGEGKAMYIDTEGTFRPERLLAVAERYGLSGSDVLDNVAYARAFNTDHQTQLLYQASAM |
| | MVESRYALLIVDSATALYRTDYSGRGELSARQMHLARFLRMLLRLADEIVSEERKRGNQNLQNLRLSLSS |
| | (CCDS 53932.1) (SEQ ID NO: 186) |
| BACH1 | MSLSENSVFAYESSVHSTNVLLSLNDQRKKDVLCDVTIFVEGQRFRAHRSVLAACSSYFHSRIVGQADGE |
| | LNITLPEEVTVKGFEPLIQFAYTAKLILSKENVDEVCKCVEFLSVHNIEESCFQFLKFKFLDSTADQQEC |
| | PRKKCFSSHCQKTDLKLSLLDQRDLETDEVEEFLENKNVQTPQCKLRRYQGNAKASPPLQDSASQTYESM |
| | CLEKDAALALPSLCPKYRKFQKAFGTDRVRTGESSVKDIHASVQPNERSENECLGGVPECRDLQVMLKCD |
| | ESKLAMEPEETKKDPASQCPTEKSEVTPFPHNSSIDPHGLYSLSLLHTYDQYGDLNFAGMQNTTVLTEKP |
| | LSGTDVQEKTFGESQDLPLKSDLGTREDSSVASSDRSSVEREVAEHLAKGFWSDICSTDTPCQMQLSPAV |
| | AKDGSEQISQKRSECPWLGIRISESPEPGQRTFTTLSSVNCPFISTLSTEGCSSNLEIGNDDYVSEPQQE |
| | PCPYACVISLGDDSETDTEGDSESCSAREQECEVKLPFNAQRIISLSRNDFQSLLKMHKLTPEQLDCIHD |
| | IRRRSKNRIAAQRCRKRKLDCIQNLESEIEKLQSEKESLLKERDHILSTLGETKQNLTGLCQKVCKEAAL |
| | SQEQIQILAKYSAADCPLSFLISEKDKSTPDGELALPSIFSLSDRPPAVLPPCARGNSEPGYARGQESQQ |
| | MSTATSEQAGPAEQCRQSGGISDFCQQMTDKCTTDE (transcription regulator protein |
| | BACH1 [Homo sapiens] CCDS 13585.1) (SEQ ID NO: 187) |
| FANCJ | MSSMWSEYTIGGVKIYFPYKAYPSQLAMMNSILRGLNSKQHCLLESPTGSGKSLALLCSA |
| | LAWQQSLSGKPADEGVSEKAEVQLSCCCACHSKDFTNNDMNQGTSRHFNYPSTPPSERNG |
| | TSSTCQDSPEKTTLAAKLSAKKQASIYRDENDDFQVEKKRIRPLETTQQIRKRHCFGTEV |
| | HNLDAKVDSGKTVKLNSPLEKINSFSPQKPPGHCSRCCCSTKQGNSQESSNTIKKDHTGK |
| | SKIPKIYFGTRTHKQIAQITRELRRTAYSGVPMTILSSRDHTCVHPEVVGNFNRNEKCME |
| | LLDGKNGKSCYFYHGVHKISDQHTLQTFQGMCKAWDIEELVSLGKKLKACPYYTARELIQ |
| | DADIIFCPYNYLLDAQIRESMDLNLKEQVVILDEAHNIEDCARESASYSVTEVQLRFARD |
| | ELDSMVNNNIRKKDHEPLRAVCCSLINWLEANAEYLVERDYESACKIWSGNEMLLTLHKM |
| | GITTATFPILQGHFSAVLQKEEKISPIYGKEEAREVPVISASTQIMLKGLFMVLDYLFRQ |
| | NSRFADDYKIAIQQTYSWTNQIDISDKNGLLVLPKNKKRSRQKTAVHVLNFWCLNPAVAF |
| | SDINGKVQTIVLTSGTLSPMKSFSSELGVTFTIQLEANHIIKNSQVWVGTIGSGPKGRNL |
| | CATFQNTETFEFQDEVGALLLSVCQTVSQGILCFLPSYKLLEKLKERWLSTGLWHNLELV |
| | KTVIVEPQGGEKTNFDELLQVYYDAIKYKGEKDGALLVAVCRGKVSEGLDFSDDNARAVI |
| | TIGIPFPNVKDLQVELKRQYNDHHSKLRGLLPGRQWYEIQAYRALNQALGRCIRHRNDWG |
| | ALILVDDRFRNNPSRYISGLSKWVRQQIQHHSTFESALESLAEFSKKHQKVLNVSIKDRT |
| | NIQDNESTLEVTSLKYSTSPYLLEAASHLSPENFVEDEAKICVQELQCPKIITKNSPLPS |
| | SIISRKEKNDPVFLEEAGKAEKIVISRSTSPTFNKQTKRVSWSSFNSLGQYFTGKIPKAT |
| | PELGSSENSASSPPRFKTEKMESKTVLPFTDKCESSNLTVNTSFGSCPQSETIISSLKID |
| | ATLTRKNHSEHPLCSEEALDPDIELSLVSEEDKQSTSNRDFETEAEDESIYFTPELYDPE |
| | DTDEEKNDLAETDRGNRLANNSDCILAKDLFEIRTIKEVDSAREVKAEDCIDTKLNGILH |
| | IEESKIDDIDGNVKTTWINELELGKTHEIEIKNFKPSPSKNKGMFPGFK (FancJ |
| | CCDS 11631.1) (SEQ ID NO: 188) |
| Topbp1 | MSRNDKEPFFVKFLKSSDNSKCFFKALESIKEFQSEEYLQIITEEEALKIKENDRSLYICDPFSGVVFDH |
| | LKKLGCRIVGPQVVIFCMHHQRCVPRAEHPVYNMVMSDVTISCTSLEKEKREEVHKYVQMMGGRVYRDLN |
| | VSVTHLIAGEVGSKKYLVAANLKKPILLPSWIKTLWEKSQEKKITRYTDINMEDFKCPIFLGCTICVTGL |
| | CGLDRKEVQQLTVKHGGQYMGQLKMNECTHLIVQEPKGQKYECAKRWNVHCVTTQWFFDSIEKGFCQDES |
| | IYKTEPRPEAKTMPNSSTPTSQINTIDSRTLSDVSNISNINASCVSESICNSLNSKLEPTLENLENLDVS |
| | AFQAPEDLLDGCRIYLCGFSGRKLDKLRRLINSGGGVRFNQLNEDVTHVIVGDYDDELKQFWNKSAHRPH |
| | VVGAKWLLECFSKGYMLSEEPYIHANYQPVEIPVSHKPESKAALLKKKNSSFSKKDFAPSEKHEQADEDL |
| | LSQYENGSSTVVEAKTSEARPFNDSTHAEPLNDSTHISLQEENQSSVSHCVPDVSTITEEGLFSQKSFLV |
| | LGFSNENESNIANIIKENAGKIMSLLSRTVADYAVVPLLGCEVEATVGEVVTNTWLVTCIDYQTLFDPKS |
| | NPLFTPVPVMTGMTPLEDCVISFSQCAGAEKESLTFLANLLGASVQEYFVRKSNAKKGMFASTHLILKER |
| | GGSKYEAAKKWNLPAVTIAWLLETARTGKRADESHFLIENSTKEERSLETEITNGINLNSDTAEHPGTRL |
| | QTHRKTVVTPLDMNRFQSKAFRAVVSQHARQVAASPAVGQPLQKEPSLHLDTPSKFLSKDKLFKPSFDVK |
| | DALAALETPGRPSQQKRKPSTPLSEVIVKNLQLALANSSRNAVALSASPQLKEAQSEKEEAPKPLHKVVV |
| | CVSKKLSKKQSELNGIAASLGADYRWSFDETVTHFIYQGRPNDTNREYKSVKERGVHIVSEHWLLDCAQE |
| | CKHLPESLYPHTYNPKMSLDISAVQDGRLCNSRLLSAVSSTKDDEPDPLILEENDVDNMATNNKESAPSN |
| | GSGKNDSKGVLTQTLEMRENFQKQLQEIMSATSIVKPQGQRTSLSRSGCNSASSTPDSTRSARSGRSRVL |
| | EALRQSRQTVPDVNTEPSQNEQIIWDDPTAREERARLASNLQWPSCPTQYSELQVDIQNLEDSPFQKPLH |
| | DSEIAKQAVCDPGNIRVTEAPKHPISEELETPIKDSHLIPTPQAPSIAFPLANPPVAPHPREKIITIEET |
| | HEELKKQYIFQLSSLNPQERIDYCHLIEKLGGLVIEKQCFDPTCTHIVVGHPLRNEKYLASVAAGKWVLH |
| | RSYLEACRTAGHFVQEEDYEWGSSSILDVLTGINVQQRRLALAAMRWRKKIQQRQESGIVEGAFSGWKVI |
| | LHVDQSREAGFKRLLQSGGAKVLPGHSVPLFKEATHLFSDLNKLKPDDSGVNIAEAAAQNVYCLRTEYIA |
| | DYLMQESPPHVENYCLPEAISFIQNNKELGTGLSQKRKAPTEKNKIKRPRVH (Topbp1, CCDS |
| | 46919.1) (SEQ ID NO: 189) |
| TOPO III | MIFPVARYALRWLRRPEDRAFSRAAMEMALRGVRKVLCVAEKNDAAKGIADLLSNGRMRRREGLSKFNKI |
| | YEFDYHLYGQNVTMVMTSVSGHLLAHDFQMQFRKWQSCNPLVLFEAEIEKYCPENFVDIKKTLERETRQC |
| | QALVIWTDCDREGENIGFEIIHVCKAVKPNLQVLRARFSEITPHAVRTACENLTEPDQRVSDAVDVRQEL |
| | DLRIGAAFTRFQTLRLQRIFPEVLAEQLISYGSCQFPTLGFVVERFKAIQAFVPEIFHRIKVTHDHKDGI |
| | VEFNWKRHRLFNHTACLVLYQLCVEDPMATVVEVRSKPKSKWRPQALDTVELEKLASRKLRINAKETMRI |
| | AEKLYTQGYISYPRTETNIFPRDLNLTVLVEQQTPDPRWGAFAQSILERGGPTPRNGNKSDQAHPPIHPT |
| | KYTNNLQGDEQRLYEFIVRHFLACCSQDAQGQETTVEIDIAQERFVAHGLMILARNYLDVYPYDHWSDKI |
| | LPVYEQGSHFQPSTVEMVDGETSPPKLLTEADLIALMEKHGIGTDATHAEHIETIKARMYVGLTPDKRFL |
| | PGHLGMGLVEGYDSMGYEMSKPDLRAELEADLKLICDGKKDKFVVLRQQVQKYKQVFIEAVAKAKKLDEA |
| | LAQYFGNGTELAQQEDIYPAMPEPIRKCPQCNKDMVLKTKKNGGFYLSCMGFPECRSAVWLPDSVLEASR |
| | DSSVCPVCQPHPVYRLKLKFKRGSLPPTMPLEFVCCIGGCDDTLREILDLRFSGGPPRASQPSGRLQANQ |
| | SLNRMDNSQHPQPADSRQTGSSKALAQTLPPPTAAGESNSVTCNCGQEAVLLTVRKEGPNRGRQFFKCNG |
| | GSCNFFLWADSPNPGAGGPPALAYRPLGASLGCPPGPGIHLGGFGNPGDGSGSGTSCLCSQPSVTRTVQK |
| | DGPNKGRQFHTCAKPREQQCGFFQWVDENTAPGTSGAPSWTGDRGRTLESEARSKRPRASSSDMGSTAKK |
| | PRKCSLCHQPGHTRPFCPQNR (DNA topoisomerase III [Homo sapiens], CCDS |
| | 11194.1) (SEQ ID NO: 190) |
| FEN1 | MGIQGLAKLIADVAPSAIRENDIKSYFGRKVAIDASMSIYQFLIAVRQGGDVLQNEEGET |
| | TSHLMGMFYRTIRMMENGIKPVYVFDGKPPQLKSGELAKRSERRAEAEKQLQQAQAAGAE |
| | QEVEKFTKRLVKVTKQHNDECKHLLSLMGIPYLDAPSEAEASCAALVKAGKVYAAATEDM |
| | DCLTFGSPVLMRHLTASEAKKLPIQEFHLSRILQELGLNQEQFVDLCILLGSDYCESIRG |
| | IGPKRAVDLIQKHKSIEEIVRRLDPNKYPVPENWLHKEAHQLFLEPEVLDPESVELKWSE |
| | PNEEELIKFMCGEKQFSEERIRSGVKRLSKSRQGSTQGRLDDFFKVTGSLSSAKRKEPEP |
| | KGSTKKKAKTGAAGKFKRGK (Fen1 CCDS 8010.1) (SEQ ID NO: 191) |
| MUS81 | MAAPVRLGRKRPLPACPNPLFVRWLTEWRDEATRSRRRTRFVFQKALRSLRRYPLPLRSGKEAKILQHFG |
| | DGLCRMLDERLQRHRTSGGDHAPDSPSGENSPAPQGRLAEVQDSSMPVPAQPKAGGSGSYWPARHSGARV |
| | ILLVLYREHLNPNGHHFLTKEELLQRCAQKSPRVAPGSARPWPALRSLLHRNLVLRTHQPARYSLTPEGL |
| | ELAQKLAESEGLSLLNVGIGPKEPPGEETAVPGAASAELASEAGVQQQPLELRPGEYRVLLCVDIGETRG |
| | GGHRPELLRELQRLHVTHTVRKLHVGDFVWVAQETNPRDPANPGELVLDHIVERKRLDDLCSSIIDGRFR |
| | EQKFRLKRCGLERRVYLVEEHGSVHNLSLPESTLLQAVTNTQVIDGFFVKRTADIKESAAYLALLTRGLQ |
| | RLYQGHTLRSRPWGTPGNPESGAMTSPNPLCSLLTFSDFNAGAIKNKAQSVREVFARQLMQVRGVSGEKA |
| | AALVDRYSTPASLLAAYDACATPKEQETLLSTIKCGRLQRNLGPALSRTLSQLYCSYGPLT (MUS81 |
| | endonuclease homolog (yeast), isoform CRA_b [Homo sapiens], CCDS |
| | 8115.1) (SEQ ID NO: 192) |
| EME1 | MALKKSSPSLDSGDSDSEELPTFAFLKKEPSSTKRRQPEREEKIVVVDISDCEASCPPAPELFSPPVPEI |
| | AETVTQTQPVRLLSSESEDEEEFIPLAQRLTCKFLTHKQLSPEDSSSPVKSVLDHQNNEGASCDWKKPFP |
| | KIPEVPLHDTPERSAADNKDLILDPCCQLPAYLSTCPGQSSSLAVTKTNSDILPPQKKTKPSQKVQGRGS |
| | HGCRQQRQARQKESTLRRQERKNAALVTRMKAQRPEECLKHIIVVLDPVLLQMEGGGQLLGALQTMECRC |
| | VIEAQAVPCSVTWRRRAGPSEDREDWVEEPTVLVLLRAEAFVSMIDNGKQGSLDSTMKGKETLQGFVTDI |
| | TAKTAGKALSLVIVDQEKCFSLELLFFDFLPCTSAQNPPRRGKQGANKQTKKQQQRQPEASIGSMVSRVD |
| | AEEALVDLQLHTEAQAQIVQSWKELADFTCAFTKAVAEAPFKKLRDETTFSFCLESDWAGGVKVDLAGRG |
| | LALVWRRQIQQLNRVSLEMASAVVNAYPSPQLLVQAYQQCFSDKERQNLLADIQVRRGEGVTSTSRRIGP |
| | ELSRRIYLQMTTLQPHLSLDSAD (crossover junction endonuclease EME1 isoform |
| | 2 [Homo sapiens], CCDS 54141.1) (SEQ ID NO: 193) |
| | MALKKSSPSLDSGDSDSEELPTFAFLKKEPSSTKRRQPEREEKIVVVDISDCEASCPPAPELFSPPVPEI |
| | AETVTQTQPVRLLSSESEDEEEFIPLAQRLTCKFLTHKQLSPEDSSSPVKSVLDHQNNEGASCDWKKPFP |
| | KIPEVPLHDTPERSAADNKDLILDPCCQLPAYLSTCPGQSSSLAVTKTNSDILPPQKKTKPSQKVQGRGS |
| | HGCRQQRQARQKESTLRRQERKNAALVTRMKAQRPEECLKHIIVVLDPVLLQMEGGGQLLGALQTMECRC |
| | VIEAQAVPCSVTWRRRAGPSEDREDWVEEPTVLVLLRAEAFVSMIDNGKQGSLDSTMKGKETLQGFVTDI |
| | TAKTAGKALSLVIVDQEKCFSAQNPPRRGKQGANKQTKKQQQRQPEASIGSMVSRVDAEEALVDLQLHTE |
| | AQAQIVQSWKELADFTCAFTKAVAEAPFKKLRDETTFSFCLESDWAGGVKVDLAGRGLALVWRRQIQQLN |
| | RVSLEMASAVVNAYPSPQLLVQAYQQCFSDKERQNLLADIQVRRGEGVTSTSRRIGPELSRRIYLQMTTL |
| | QPHLSLDSAD (crossover junction endonuclease EME1 isoform 1 [Homo |
| | sapiens], CCDS 11565.1) (SEQ ID NO: 194) |
| SLX1 | MGPAGVAARPGRFFGVYLLYCLNPRYRGRVYVGFIVNTARRVQQHNGGRKKGGAWRISGRGPWEMVLVVH |
| | GFPSSVAALRFEWAWQHPHASRRLAHVGPRLRGETAFAFHLRVLAHMLRAPPWARLPLTLRWVRPDLRQD |
| | LCLPPPPHVPLAFGPPPPQAPAPRRRAGPFDDAEPEPDQGDPGACCSLCAQTIQDEEGPLCCPHPGCLLR |
| | AHVICLAEEFLQEEPGQLLPLEGQCPCCEKSLLWGDLIWLCQMDTEKEVEDSELEEAHWTDLLET |
| | (structure-specific endonuclease subunit SLX1 isoform 2 [Homo |
| | sapiens], CCDS 32431.1) (SEQ ID NO: 195) |
| | MGPAGVAARPGRFFGVYLLYCLNPRYRGRVYVGFIVNTARRVQQHNGGRKKGGAWRISGRGPWEMVLVVH |
| | GFPSSVAALRDEEGPLCCPHPGCLLRAHVICLAEEFLQEEPGQLLPLEGQCPCCEKSLLWGDLIWLCQMD |
| | TEKEVEDSELEEAHWTDLLET (structure-specific endonuclease subunit SLX1 |
| | isoform 1 [Homo sapiens], CCDS 32432.1) (SEQ ID NO: 196) |
| SLX4 | MKLSVNEAQLGFYLGSLSHLSACPGIDPRSSEDQPESLKTGQMMDESDEDFKELCASFFQRVKKHGIKEV |
| | SGERKTQKAASNGTQIRSKLKRTKQTATKTKTLQGPAEKKPPSGSQAPRTKKQRVTKWQASEPAHSVNGE |
| | GGVLASAPDPPVLRETAQNTQTGNQQEPSPNLSREKTRENVPNSDSQPPPSCLTTAVPSPSKPRTAQLVL |
| | QRMQQFKRADPERLRHASEECSLEAAREENVPKDPQEEMMAGNVYGLGPPAPESDAAVALTLQQEFARVG |
| | ASAHDDSLEEKGLFFCQICQKNLSAMNVTRREQHVNRCLDEAEKTLRPSVPQIPECPICGKPFLTLKSRT |
| | SHLKQCAVKMEVGPQLLLQAVRLQTAQPEGSSSPPMFSFSDHSRGLKRRGPTSKKEPRKRRKVDEAPSED |
| | LLVAMALSRSEMEPGAAVPALRLESAFSERIRPEAENKSRKKKPPVSPPLLLVQDSETTGRQIEDRVALL |
| | LSEEVELSSTPPLPASRILKEGWERAGQCPPPPERKQSFLWEGSALTGAWAMEDFYTARLVPPLVPQRPA |
| | QGLMQEPVPPLVPPEHSELSERRSPALHGTPTAGCGSRGPSPSASQREHQALQDLVDLAREGLSASPWPG |
| | SGGLAGSEGTAGLDVVPGGLPLIGFVVPSQDKHPDRGGRILLSLGLLVADFGAMVNNPHLSDVQFQTDSG |
| | EVLYAHKFVLYARCPLLIQYVNNEGFSAVEDGVLTQRVLLGDVSTEAARTFLHYLYTADTGLPPGLSSEL |
| | SSLAHRFGVSELVHLCEQVPIATDSEGKPWEEKEAENCESRAENFQELLRSMWADEEEEAETLLKSKDHE |
| | EDQENVNEAEMEEIYEFAATQRKLLQEERAAGAGEDADWLEGGSPVSGQLLAGVQVQKQWDKVEEMEPLE |
| | PGRDEAATTWEKMGQCALPPPQGQHSGARGAEAPEQEAPEEALGHSSCSSPSRDCQAERKEGSLPHSDDA |
| | GDYEQLFSSTQGEISEPSQITSEPEEQSGAVRERGLEVSHRLAPWQASPPHPCRFLLGPPQGGSPRGSHH |
| | TSGSSLSTPRSRGGTSQVGSPTLLSPAVPSKQKRDRSILTLSKEPGHQKGKERRSVLECRNKGVLMFPEK |
| | SPSIDLTQSNPDHSSSRSQKSSSKLNEEDEVILLLDSDEELELEQTKMKSISSDPLEEKKALEISPRSCE |
| | LFSIIDVDADQEPSQSPPRSEAVLQQEDEGALPENRGSLGRRGAPWLFCDRESSPSEASTTDTSWLVPAT |
| | PLASRSRDCSSQTQISSLRSGLAVQAVTQHTPRASVGNREGNEVAQKFSVIRPQTPPPQTPSSCLTPVSP |
| | GTSDGRRQGHRSPSRPHPGGHPHSSPLAPHPISGDRAHFSRRFLKHSPPGPSFLNQTPAGEVVEVGDSDD |
| | EQEVASHQANRSPPLDSDPPIPIDDCCWHMEPLSPIPIDHWNLERTGPLSTSSPSRRMNEAADSRDCRSP |
| | GLLDTTPIRGSCTTQRKLQEKSSGAGSLGNSRPSFLNSALWDVWDGEEQRPPETPPPAQMPSAGGAQKPE |
| | GLETPKGANRKKNLPPKVPITPMPQYSIMETPVLKKELDRFGVRPLPKRQMVLKLKEIFQYTHQTLDSDS |
| | EDESQSSQPLLQAPHCQTLASQTYKPSRAGVHAQQEATTGPGAHRPKGPAKTKGPRHQRKHHESITPPSR |
| | SPTKEAPPGLNDDAQIPASQESVATSVDGSDSSLSSQSSSSCEFGAAFESAGEEEGEGEVSASQAAVQAA |
| | DTDEALRCYIRSKPALYQKVLLYQPFELRELQAELRQNGLRVSSRRLLDFLDTHCITFTTAATRREKLQG |
| | RRRQPRGKKKVERN (structure-specific endonuclease subunit SLX4 [Homo |
| | sapiens], CCDS 10506.2) (SEQ ID NO: 197) |
| a FA protein | — |

[1328] In some embodiments, the methods described herein involve down-regulating one HDR pathway in order to promote another HDR pathway. For example, the SSA pathway may be down-regulated in order to promote HR and/or alt-HR. In another embodiment, the alt-HR pathway may be downregulate in order to promote HR and/or SSA. In another embodiment, the alt-HR pathway may be downregulated to promote SSA and HR.

[1329] For instance, the methods may involve modulating, e.g., inhibiting, a component (e.g., exactly one component, or one or more components, e.g., two or three components) of the HDR pathway, e.g., a component of Table VI.1(C) or VI.2. More specifically, the methods may involve modulating, e.g., inhibiting, exactly one of, or one or more of a PARP, PARP1, PARP2, MRN complex, MRE11, RAD50, NBS1, ATM, BRCA2, BRCA1, BRCA1 complex, BRCA1-C complex, CtIP, EX01, BLM, PP4, RAD51, FEN1, MUS81/EME1, SLX1/SLX4, and a FA protein. In some embodiments, one or more of alt-HR, anti-HR, NHEJ, MMEJ, SSA, SSBR, MMR, NER, and BER, are not substantially down-regulated, e.g., in some embodiments the only DNA damage repair pathway to be substantially down-regulated is one HDR pathway. In some embodiments, a PARP (e.g., a PARP which is involved in NHEJ and/or SSBr) is not down-regulated. In some embodiments, XRCC1 (e.g., involved in NER, alt-NHEJ, BER, and/or SSBr) is not down-regulated.

[1330] In some embodiments, RTEL is inhibited in order to promote HDR.

[1331] In some embodiments, an HDR pathway is down-regulated using an siRNA against a component of the pathway, e.g., BRCA2, BRCA1, or Rad51, or a Rad51 inhibitor such as B02, A03, AI-10, RI-1, RI-2, or IBR2, or an agent of Table VI.3, or any combination thereof. Down-regulation may result in enhanced alt-HR repair (see below). In some embodiments, an HDR pathway is down regulated using an HDR-enhancing gRNA that targets a component of the HDR pathway, e.g., BRCA2, BRCA1, or Rad51. In some embodiments, the HDR-enhancing gRNA is used in combination with an eiCas9 molecule. In some embodiments, the HDR-enhancing gRNA is used in combination with an eaCas9 molecule. In some embodiments, the HDR-enhancing gRNA is administered to the cell as a HDR-enhancing gRNA:Cas9 molecule complex.

TABLE VI.3
Down-regulators of HDR. (In this table and throughout
this disclosure, when siRNAs are written with both upper-
case and lower-case letters, the upper-case letters indicate
ribonucleotides and the lower-case letters indicate
deoxyribonucleotides.)
1. BRCA1

| siRNA | BRCA1 siRNA (h), sold by Santa Cruz Biotechnology; | | | | | |
|---|---|---|---|---|---|---|
| | BRCA1 siRNA II, sold by Cell Signaling Technology | | | | | |
| | Entrez | Entrez | | | | |
| | Gene | Gene | GenBank | Reagent | SEQ | |
| | Symbol | ID | Acc. No. | Source ID | ID | Sequence (sense) |
| | BRCA1 | 672 | NM_007294 | D-003461-05 | 198 | CAGCUACCCUUCCAUCAUA |
| | BRCA1 | 672 | NM_007294 | D-003461-06 | 199 | GGGAUACCAUGCAACAUAA |
| | BRCA1 | 672 | NM_007294 | D-003461-07 | 200 | GAAGGAGCUUUCAUCAUUC |
| | BRCA1 | 672 | NM_007294 | D-003461-08 | 203 | CUAGAAAUCUGUUGCUAUG |
| | BRCA1 | 672 | NM_007294 | s224683 | 204 | UUCUUUAAUAGACUGGGUCac |
| | BRCA1 | 672 | NM_007294 | s458 | 205 | UAUGAUGGAAGGGUAGCUGtt |
| | BRCA1 | 672 | NM_007294 | s459 | 206 | UAUCAGGUUAUGUUGCAUGgt |

| | |
|---|---|
| antibodies | BRCA1 (D-9) antibody, sold by Santa Cruz Biotechnology; |
| | BRCA1 (D-20) antibody, sold by Santa Cruz Biotechnology; |
| | BRCA1 (GLK-2) antibody, sold by Santa Cruz Biotechnology; |
| | BRCA1 (C-20) antibody, sold by Santa Cruz Biotechnology; |
| | BRCA1 (287.17) antibody, sold by Santa Cruz Biotechnology; |
| | BRCA1 antibody, sold by Cell Signaling Technology |

2. BRCA2

| siRNA | BRCA2 silencer # 121226, sold by Life Technologies; | | | | | |
|---|---|---|---|---|---|---|
| | BRCA2-set siRNA/shRNA/RNAi Lentivector, sold by ABM | | | | | |
| | Entrez | Entrez | | | | |
| | Gene | Gene | GenBank | Reagent | SEQ | |
| | Symbol | ID | Acc. No. | Source ID | ID | Sequence (sense) |
| | BRCA2 | 675 | NM_000059 | D-003462-01 | 207 | GAAACGGACUUGCUAUUUA |
| | BRCA2 | 675 | NM_000059 | D-003462-02 | 208 | GUAAAGAAAUGCAGAAUUC |
| | BRCA2 | 675 | NM_000059 | D-003462-03 | 209 | GGUAUCAGAUGCUUCAUUA |
| | BRCA2 | 675 | NM_000059 | D-003462-04 | 210 | GAAGAAUGCAGGUUUAAUA |
| | BRCA2 | 675 | NM_000059 | s2083 | 211 | UUCCGUUUAAUUUCAACUGta |
| | BRCA2 | 675 | NM_000059 | s2084 | 212 | UUGCGAAAUAUGUAUAAUCca |
| | BRCA2 | 675 | NM_000059 | s224695 | 213 | UACGUUUUUAGGUGAAGCCtg |

| | |
|---|---|
| antibodies | Anti-BRCA2 antibody (ab27976), sold by Abcam; |
| | Anti-BRCA2 antibody (ab9143), sold by Abcam; |
| | Anti-BRCA2 antibody (ab123491), sold by Abcam |

3. Rad51

| siRNA | Rad51 siRNA (m), sold by Santa Cruz Biotechnology | | | | | |
|---|---|---|---|---|---|---|
| | siRNA from siRNA plasmid, pKD-Rad51-v1, sold by EMD | | | | | |
| | Millipore | | | | | |
| | Entrez | Entrez | | | | |
| | Gene | Gene | GenBank | Reagent | SEQ | |
| | Symbol | ID | Acc. No. | Source ID | ID | Sequence (sense) |
| | RAD51 | 5888 | NM_002875 | D-003530-05 | 214 | GCAGUGAUGUCCUGGAUAA |
| | RAD51 | 5888 | NM_002875 | D-003530-07 | 215 | CCAACGAUGUGAAGAAAUU |
| | RAD51 | 5888 | NM_002875 | D-003530-08 | 216 | AAGCUAUGUUCGCCAUUAA |
| | RAD51 | 5888 | NM_002875 | s11734 | 217 | UGCAUACCUAGAUUCUACCat |
| | RAD51 | 5888 | NM_002875 | s11735 | 218 | UGAUUAGUGAUUACCACUGct |
| | RAD51 | 5888 | NM_002875 | s11736 | 219 | UGCUUGAUAAAGGAGCUGGgt |

| | |
|---|---|
| Antibodies | RAD51 mouse monoclonal antibody (clone 3C10), sold by |
| | Life Technologies; |
| | Rad51 (3C10) antibody, sold by Santa Cruz Biotechnology; |
| | Rad51 (F-11) antibody, sold by Santa Cruz Biotechnology; |
| | Rad51 (G-9) antibody, sold by Santa Cruz Biotechnology; |

Compounds

| | |
|---|---|
| B02 | Huang et al. (2011) ACS CHEM. BIOL. 6(6): 628-35. |
| A03 | Huang et al. (2011) ACS CHEM. BIOL. 6(6): 628-35. |
| RI-1 | Budke et al. (2012) NUCLEIC ACIDS RES. 40(15): 7347-57. |
| IBR2 | Zhu et al. (2013) EMBO MOL. MED. 5(3): 353-65. |

[1332] HDR and the Cell Cycle

[1333] HDR is highly influenced by the stage of the cell cycle. Cell cycle regulation acts on several points of the pathway, which are discussed below.

[1334] First, in the wild-type context, HDR is thought to be limited to S and G2 phase because HDR requires RAD51 to interact with the C-terminus of BRCA2, and this interaction only occurs during S and G2 phases.

[1335] In addition, cell cycle-dependent differences in resection may help limit homologous recombination to S/G2. In mammals, to promote HDR, the resecting endonuclease CtIP is activated by CDK phosphorylation at threonine 847. A further phosphorylation on serine 327 promotes CtIP's interaction with the BRCT domain of BRCA1 (which is important for HDR). In a mutually antagonistic arrangement, BRCA1-CtIP favors homologous recombination by antagonizing 53BP1-RIF1 in G2, whereas in G1, 53BP1-RIF2 blocks BRCA1 from accumulating at DSBs. Resection involves not only nucleases but helicases. Helicases are motor proteins that move along the backbone of the DNA and alter the structure of DNA by unwinding DNA or promoting the annealing of single strands. Unwinding of the DNA occurs through an ATP-dependent process that breaks the hydrogen bonds between the nucleotides of annealed strands, e.g., through ATP hydrolysis. Unwinding activity can occur in the 5′ to 3′ direction or in the 3′ to 5′ direction. Helicase activity also includes promoting ATP-independent or ATP-dependent annealing of two single strands with significant or sufficient complementarity. The helicase BLM also undergoes cell-cycle dependent regulation. More particularly, sumoylation of BLM appears to promote recombination.

[1336] The stage of the cell cycle also affects the formation of the RAD51 filament. For instance, RPA (which forms a substrate for assembly of the RAD51 filament) is phosphorylated in a cell cycle dependent manner, affecting its ability to localize properly. In addition, RAD51 is more directly regulated; the CHK1 kinase phosphorylates it, allowing it to form foci at the sites of DNA damage and promote repair. As an additional form of regulation, CDK-cyclin A phosphorylates BRCA2 in M phase, preventing BRCA2 from interacting with RAD51, effectively shutting down HDR at the end of G2 phase.

[1337] In addition, the MRN complex may also be a target of cell cycle dependent regulation.

### VI.2 Antirecombinant Factors

[1338] The anti-homologous recombination (anti-HR) pathway is an HDR pathway and involves helicases that disrupt RAD51 ssDNA filaments. In mammals, the helicase FBH1 is thought to prevent RAD51 from localizing to breaks (e.g., by replacing Rad51 on a filament), thereby suppressing HDR. FBH1's role may be to prevent spontaneous synthesis dependent strand annealing that initiates inappropriately. A second helicase, RECQ5, that has a 3′ to 5′ activity, can suppress HDR by binding RAD51 and displacing it from the ssDNA. A third helicase, BLM, can also bind RAD51 and disrupt RAD51 ssDNA filaments. BLM and RECQ5 are both members of the RecQ helicase family and act in the 3′ to 5′ direction. A fourth helicase, FANCJ, acts in the 5′ to 3′ direction and can disrupt RAD51 ssDNA filaments. A fifth anti-recombination helicase is WRN (Werner). A sixth protein, PARI, has a helicase domain but lacks Walker A and B motifs, so it may not be an active helicase. PARI can replace a Rad51 filament in vitro. Lastly, RTEL has been shown to displace Rad51. Regulator of telomere elongation helicase (RTEL or RTEL1) has ATP-dependent 5′ to 3′ DNA helicase activity.

[1339] Another class of anti-recombination factors disrupts D-loops. These factors include RECQl, BLM, and WRN.

[1340] Rap80 also acts against homologous recombination. The BRCA1-RAP80 complex restricts end resection in S/G(2) phase of the cell cycle, thereby limiting HDR. It recruits the BRCA1 A complex and that prevents the repair throughout HR (see Hu Y. et al. (2011) GENES DEV. 25(7): 685-700; and Coleman and Greenberg (2011) J. BIOL. CHEM. 286(15): 13669-80.

[1341] Several miRNAs are also involved in anti-HR: miR-545 (which downregulates BRCA1 and opposes Rad51 focus formation), miR-107 and miR-155 (which downregulate Rad51), miR-1255 (which downregulates BRCA1 and BRCA2), miR-148 (which downregulates Rad51, especially in G1), and miR-193 (which downregulates BRCA1, BRCA2, and Rad51). Anti-miRs can increase the levels of homologous repair factors in G1.

[1342] In one embodiment, HDR repair pathways can be promoted by down-regulating the antirecombinant factors of the anti-HR pathway. For example, in one embodiment, a Cas9 molecule and gRNA can induce a DSB in a desired location during G2 or another phase of the cycle. This DSB can be formed using, e.g., one Cas9 molecule with the ability to produce DSBs, or two nickases. A template nucleic acid can be added to the cell, so that the HDR machinery repairs the DSB using the template nucleic acid. During the S/G2 phase, an anti-HR inhibitor, as described herein, can prevent unproductive resolution of the HDR intermediate.

[1343] Accordingly, in some embodiments, the methods herein involve down-regulating the anti-HR pathway in order to promote HDR. For instance, the methods may involve modulating, e.g., inhibiting, a component (e.g., exactly one component, or one or more components, e.g., two or three components) of the anti-HR pathway, e.g., a component of Table VI.1(D) or Table VI.4. More specifically, the methods may involve modulating, e.g., inhibiting, exactly one of, or one or more of an anti-HR helicase, FBH1, RECQ5, BLM, a RecQ helicase, PARI, Rap80, FANCJ, FANCM, RECQ1, or RAD54. In embodiments, one or more of HDR, alt-HR, NHEJ, MMEJ, SSA, SSBR, MMR, NER, and BER are not substantially down-regulated, e.g., in some embodiments the only DNA damage repair pathway to be substantially down-regulated is the anti-HR pathway.

TABLE VI.4
Factors that promote anti-HR.

| Factor | Sequence |
|---|---|
| an anti-HR helicase | — |
| FBH1 | >sp\|Q8NFZ0\|FBX18_HUMAN F-box only |
| | protein 18 OS = Homo sapiens GN = FBXO18 PE = 1 SV = 2 |
| | (SEQ ID NO: 220) |
| | MRRFKRKHLTAIDCQHLARSHLAVTQPFGQRWTNRDPNHGLYPKPRTKRGSRGQGSQRCI |
| | PEFFLAGKQPCTNDMAKSNSVGQDSCQDSEGDMIFPAESSCALPQEGSAGPGSPGSAPPS |
| | RKRSWSSEEESNQATGTSRWDGVSKKAPRHHLSVPCTRPREARQEAEDSTSRLSAESGET |
| | DQDAGDVGPDPIPDSYYGLLGTLPCQEALSHICSLPSEVLRHVFAFLPVEDLYWNLSLVC |
| | HLWREIISDPLFIPWKKLYHRYLMNEEQAVSKVDGILSNCGIEKESDLCVLNLIRYTATT |
| | KCSPSVDPERVLWSLRDHPLLPEAEACVRQHLPDLYAAAGGVNIWALVAAVVLLSSSVND |
| | IQRLLFCLRRPSSTVTMPDVTFTLYCIAVLLYAMREKGINISNRIHYNIFYCLYLQENSC |
| | TQATKVKEEPSVWPGKKTIQLTHEQQLILNHKMEPLQVVKIMAFAGTGKTSTLVKYAEKW |
| | SQSRFLYVTFNKSIAKQAERVFPSNVICKTFHSMAYGHIGRKYQSKKKLNLFKLTPFMVN |
| | SVLAEGKGGFIRAKLVCKTLENFFASADEELTIDHVPIWCKNSQGQRVMVEQSEKLNGVL |
| | EASRLWDNMRKLGECTEEAHQMTHDGYLKLWQLSKPSLASFDAIFVDEAQDCTPAIMNIV |
| | LSQPCGKIFVGDPHQQIYTFRGAVNALFTVPHTHVFYLTQSFRFGVEIAYVGATILDVCK |
| | RVRKKTLVGGNHQSGIRGDAKGQVALLSRTNANVFDEAVRVTEGEFPSRIHLIGGIKSFG |
| | LDRIIDIWILLQPEEERRKQNLVIKDKFIRRWVHKEGFSGFKRYVTAAEDKELEAKIAVV |
| | EKYNIRIPELVQRIEKCHIEDLDFAEYILGTVHKAKGLEFDTVHVLDDFVKVPCARHNLP |
| | QLPHFRVESFSEDEWNLLYVAVTRAKKRLIMTKSLENILTLAGEYFLQAELTSNVLKTGV |
| | VRCCVGQCNNAIPVDTVLTMKKLPITYSNRKENKGGYLCHSCAEQRIGPLAFLTASPEQV |
| | RAMERTVENIVLPRHEALLFLVF |
| RECQ5 | See Table VI.2 |
| BLM | See Table VI.2 |
| FANCJ | See Table VI.2 |
| PARI | >sp\|Q9NWS1\|PARI_HUMAN PCNA-interacting |
| | partner OS = Homo sapiens GN = PARPBP PE = 1 SV = 3 |
| | (SEQ ID NO: 221) |
| | MAVFNQKSVSDMIKEFRKNWRALCNSERTTLCGADSMLLALQLSMAENNKQHSGEFTVSL |
| | SDVLLTWKYLLHEKLNLPVENMDVTDHYEDVRKIYDDFLKNSNMLDLIDVYQKCRALTSN |
| | CENYNTVSPSQLLDFLSGKQYAVGDETDLSIPTSPTSKYNRDNEKVQLLARKIIFSYLNL |
| | LVNSKNDLAVAYILNIPDRGLGREAFTDLKHAAREKQMSIFLVATSFIRTIELGGKGYAP |
| | PPSDPLRTHVKGLSNFINFIDKLDEILGEIPNPSIAGGQILSVIKMQLIKGQNSRDPFCK |
| | AIEEVAQDLDLRIKNIINSQEGVVALSTTDISPARPKSHAINHGTAYCGRDTVKALLVLL |
| | DEEAANAPTKNKAELLYDEENTIHHHGTSILTLFRSPTQVNNSIKPLRERICVSMQEKKI |
| | KMKQTLIRSQFACTYKDDYMISKDNWNNVNLASKPLCVLYMENDLSEGVNPSVGRSTIGT |
| | SFGNVHLDRSKNEKVSRKSTSQTGNKSSKRKQVDLDGENILCDNRNEPPQHKNAKIPKKS |
| | NDSQNRLYGKLAKVAKSNKCTAKDKLISGQAKLTQFFRL |
| | >sp\|Q9NWS1\|PARI_HUMAN PCNA-interacting partner |
| | OS = Homo sapiens GN = PARPBP PE = 1 SV = 3 (SEQ ID NO: 222) |
| | MAVFNQKSVSDMIKEFRKNWRALCNSERTTLCGADSMLLALQLSMAENNKQHSGEFTVSL |
| | SDVLLTWKYLLHEKLNLPVENMDVTDHYEDVRKIYDDFLKNSNMLDLIDVYQKCRALTSN |
| | CENYNTVSPSQLLDFLSGKQYAVGDETDLSIPTSPTSKYNRDNEKVQLLARKIIFSYLNL |
| | LVNSKNDLAVAYILNIPDRGLGREAFTDLKHAAREKQMSIFLVATSFIRTIELGGKGYAP |
| | PPSDPLRTHVKGLSNFINFIDKLDEILGEIPNPSIAGGQILSVIKMQLIKGQNSRDPFCK |
| | AIEEVAQDLDLRIKNIINSQEGVVALSTTDISPARPKSHAINHGTAYCGRDTVKALLVLL |
| | DEEAANAPTKNKAELLYDEENTIHHHGTSILTLFRSPIQVNNSIKPLRERICVSMQEKKI |
| | KMKQTLIRSQFACTYKDDYMISKDNWNNVNLASKPLCVLYMENDLSEGVNPSVGRSTTGT |
| | SFGNVHLDRSKNEKVSRKSTSQTGNKSSKRKQVDLDGENILCDNRNEPPQHKNAKIPKKS |
| | NDSQNRLYGKLAKVAKSNKCTAKDKLISGQAKLTQFFRL |
| | >sp\|Q9NWS1-2\|PARI_HUMAN Isoform 2 of PCNA- |
| | interacting partner OS = Homo sapiens GN = PARPBP |
| | (SEQ ID NO: 223) |
| | MDVTDHYEDVRKIYDDFLKNSNMLDLIDVYQKCRALTSNCENYNTVSPSQLLDFLSGKQY |
| | AVGDETDLSIPTSPISKYNRDNEKVQLLARKIIFSYLNLLVNSKNDLAVAYILNIPDRGL |
| | GREAFTDLKHAAREKQMSIFLVATSFIRTIELGGKGYAPPPSDPLRTHVKGLSNFINFID |
| | KLDEILGEIPNPSIAGGQILSVIKMQLIKGQNSRDPFCKAIEEVAQDLDLRIKNIINSQE |
| | GVVALSTIDISPARPKSHAINHGTAYCGRDTVKALLVLLDEEAANAPTKNKAELLYDEEN |
| | TIHHHGTSILTLFRSPIQVNNSIKPLRERICVSMQEKKIKMKQTLIRSQFACTYKDDYMI |
| | SKDNWNNVNLASKPLCVLYMENDLSEGVNPSVGRSTIGTSFGNVHLDRSKNEKVSRKSTS |
| | QTGNKSSKRKQVDLDGENILCDNRNEPPQHKNAKIPKKSNDSQNRLYGKLAKVAKSNKCT |
| | AKDKLISGQAKLTQFFRL |
| | >sp\|Q9NWS1-3\|PARI_HUMAN Isoform 3 of PCNA- |
| | interacting partner OS = Homo sapiens GN = PARPBP |
| | (SEQ ID NO: 224) |
| | MAVFNQKSVSDMIKEFRKNWRALCNSERTTLCGADSMLLALQLSMAENNKQHSGEFTVSL |
| | SDVLLTWKYLLHEKLNLPVENMDVIDHYEDVRKIYDDFLKNSNMLDLIDVYQKCRALTSN |
| | CENYNTVSPSQLLDFLSGKQYAVGDETDLSIPTSPISKYNRDNEKALPVLKR |
| | >sp\|Q9NWS1-4\|PARI_HUMAN Isoform 4 of PCNA- |
| | interacting partner OS = Homo sapiens GN = PARPBP |
| | (SEQ ID NO: 225) |
| | MAVFNQKSVSDMIKEFRKNWRALCNSERTTLCGADSMLLALQLSMAENNKQHSGEFTVSL |
| | SDVLLTWKYLLHEKLNLPVENMDVIDHYEDVRKIYDDFLKNSNMLDLIDVYQKCRALTSN |
| | CENYNTVSPVSIF |
| | >sp\|Q9NWS1-5\|PARI_HUMAN Isoform 5 of PCNA- |
| | interacting partner OS = Homo sapiens GN = PARPBP |
| | (SEQ ID NO: 226) |
| | MQLIKGQNSRDPFCKAIEEVAQDLDLRIKNIINSQEGVVALSTIDISPARPKSHAINHGT |
| | AYCGRDTVKALLVLLDEEAANAPTKNKAELLYDEENTIHHHGTSILTLFRSPIQVNNSIK |
| | PLRERICVSMQEKKIKMKQTLIRSQFACTYKDDYMISKDNWNNVNLASKPLCVLYMENDL |
| | SEGVNPSVGRSTIGTSFGNVHLDRSKNEKVSRKSTSQTGNKSSKRKQVDLDGENILCDNR |
| | NEPPQHKNAKIPKKSNDSQNRLYGKLAKVAKSNKCIAKDKLISGQAKLTQFFRL |
| | >sp\|Q9NWS1-6\|PARI_HUMAN Isoform 6 of PCNA- |
| | interacting partner OS = Homo sapiens GN = PARPBP |
| | (SEQ ID NO: 227) |
| | MAVFNQKSVSDMIKEFRKNWRALCNSERTTLCGADSMLLALQLSMAENNKQHSGEFTVSL |
| | SDVLLTWKYLLHEKLNLPVENMDVIDHYEDVRKIYDDFLKNSNMLDLIDVYQKCRALTSN |
| | CENYNTVSPSQLLDFLSGKQYAVGDETDLSIPTSPISKYNRDNEKVQLLARKIIFSYLNL |
| | LVNSKNDLAVAYILNIPDRGLGREAFTDLKHAAREKQMSIFLVATSFIRTIELGGKGYAP |
| | PPSDPLRTHVKGLSNFINFIDKLDEILGEIPNPRGCKSICWKINNWNEFWKCSSGQK |
| | >sp\|Q9NWS1-7\|PARI_HUMAN Isoform 7 of PCNA- |
| | interacting partner OS = Homo sapiens GN = PARPBP |
| | (SEQ ID NO: 228) |
| | MAVFNQKSVSDMIKEFRKNWRALCNSERTTLCGADSMLLALQLSMAENNKQHSGEFTVSL |
| | SDVLLTWKYLLHEKLNLPVENMDVTDHYEDVRKIYDDFLKNSNMLDLIDVYQKCRALTSN |
| | CENYNTVSPSQLLDFLSGKQYAVGDETDLSIPTSPTSKYNRDNEKVQLLARKIIFSYLNL |
| | LVNSKNDLAVAYILNIPDRGLGREAFTDLKHAAREKQMSIFLVATSFIRTIELGGKGYAP |
| | PPSDPLRTHVKGLSNFINFIDKLDEILGEIPNPRSPTQVNNSIKPLRERICVSMQEKKIK |
| | RV |
| RECQ1 | See Table VI.2 |
| WRN | See Table VI.2 |
| RTEL | MPKIVLNGVTVDFPFQPYKCQQEYMTKVLECLQQKVNGILESPTGTGKTLCLLCTTLAWR |
| | EHLRDGISARKIAERAQGELFPDRALSSWGNAAAAAGDPIACYTDIPKIIYASRTHSQLT |
| | QVINELRNTSYRPKVCVLGSREQLCIHPEVKKQESNHLQIHLCRKKVASRSCHFYNNVEE |
| | KSLEQELASPILDIEDLVKSGSKHRVCPYYLSRNLKQQADIIFMPYNYLLDAKSRRAHNI |
| | DLKGTVVIFDEAHNVEKMCEESASFDLTPHDLASGLDVIDQVLEEQTKAAQQGEPHPEFS |
| | ADSPSPGLNMELEDIAKLKMILLRLEGAIDAVELPGDDSGVTKPGSYIFELFAEAQITFQ |
| | TKGCILDSLDQIIQHLAGRAGVFTNTAGLQKLADIIQIVFSVDPSEGSPGSPAGLGALQS |
| | YKVHIHPDAGHRRTAQRSDAWSTTAARKRGKVLSYWCFSPGHSMHELVRQGVRSLILTSG |
| | TLAPVSSFALEMQIPFPVCLENPHIIDKHQIWVGVVPRGPDGAQLSSAFDRRFSEECLSS |
| | LGKALGNIARVVPYGLLIFFPSYPVMEKSLEFWRARDLARKMEALKPLFVEPRSKGSFSE |
| | TISAYYARVAAPGSTGATFLAVCRGKASEGLDFSDTNGRGVIVTGLPYPPRMDPRVVLKM |
| | QFLDEMKGQGGAGGQFLSGQEWYRQQASRAVNQAIGRVIRHRQDYGAVFLCDHRFAFADA |
| | RAQLPSWVRPHVRVYDNFGHVIRDVAQFFRVAERTMPAPAPRATAPSVRGEDAVSEAKSP |
| | GPFFSTRKAKSLDLHVPSLKQRSSGSPAAGDPESSLCVEYEQEPVPARQRPRGLLAALEH |
| | SEQRAGSPGEEQAHSCSTLSLLSEKRPAEEPRGGRKKIRLVSHPEEPVAGAQTDRAKLFM |
| | VAVKQELSQANFATFTQALQDYKGSDDFAALAACLGPLFAEDPKKHNLLQGFYQFVRPHH |
| | KQQFEEVCIQLTGRGCGYRPEHSIPRRQRAQPVLDPTGRTAPDPKLTVSTAAAQQLDPQE |
| | HLNQGRPHLSPRPPPTGDPGSQPQWGSGVPRAGKQGQHAVSAYLADARRALGSAGCSQLL |
| | AALTAYKQDDDLDKVLAVLAALTTAKPEDFPLLHRFSMFVRPHHKQRFSQICIDLIGRPY |
| | PGMEPPGPQEERLAVPPVLTHRAPQPGPSRSEKTGKTQSKISSFLRQRPAGTVGAGGEDA |
| | GPSQSSGPPHGPAASEWGL (RTEL Isoform 1 CCDS 13531.1) (SEQ ID |
| | NO: 229) |
| | MPKIVLNGVTVDFPFQPYKCQQEYMTKVLECLQQKVNGILESPTGTGKTLCLLCTTLAWR |
| | EHLRDGISARKIAERAQGELFPDRALSSWGNAAAAAGDPIACYTDIPKIIYASRTHSQLT |
| | QVINELRNTSYRSRCRATLWVLETAPPRPTVLSPIRPKVCVLGSREQLCIHPEVKKQESN |
| | HLQIHLCRKKVASRSCHFYNNVEEKSLEQELASPILDIEDLVKSGSKHRVCPYYLSRNLK |
| | QQADIIFMPYNYLLDAKSRRAHNIDLKGTVVIFDEAHNVEKMCEESASFDLTPHDLASGL |
| | DVIDQVLEEQTKAAQQGEPHPEFSADSPSPGLNMELEDIAKLKMILLRLEGAIDAVELPG |
| | DDSGVTKPGSYIFELFAEAQITFQTKGCILDSLDQIIQHLAGRAGVFTNTAGLQKLADII |
| | QIVFSVDPSEGSPGSPAGLGALQSYKVHIHPDAGHRRTAQRSDAWSTTAARKRGKVLSYW |
| | CFSPGHSMHELVRQGVRSLILTSGTLAPVSSFALEMQIPFPVCLENPHIIDKHQIWVGVV |
| | PRGPDGAQLSSAFDRRFSEECLSSLGKALGNIARVVPYGLLIFFPSYPVMEKSLEFWRAR |
| | DLARKMEALKPLFVEPRSKGSFSETISAYYARVAAPGSTGATFLAVCRGKASEGLDFSDT |
| | NGRGVIVTGLPYPPRMDPRVVLKMQFLDEMKGQGGAGGQFLSGQEWYRQQASRAVNQAIG |
| | RVIRHRQDYGAVFLCDHRFAFADARAQLPSWVRPHVRVYDNFGHVIRDVAQFFRVAERTM |
| | PAPAPRATAPSVRGEDAVSEAKSPGPFFSTRKAKSLDLHVPSLKQRSSGSPAAGDPESSL |
| | CVEYEQEPVPARQRPRGLLAALEHSEQRAGSPGEEQAHSCSTLSLLSEKRPAEEPRGGRK |
| | KIRLVSHPEEPVAGAQTDRAKLFMVAVKQELSQANFATFTQALQDYKGSDDFAALAACLG |
| | PLFAEDPKKHNLLQGFYQFVRPHHKQQFEEVCIQLTGRGCGYRPEHSIPRRQRAQPVLDP |
| | TGRTAPDPKLTVSTAAAQQLDPQEHLNQGRPHLSPRPPPTGDPGSQPQWGSGVPRAGKQG |
| | QHAVSAYLADARRALGSAGCSQLLAALTAYKQDDDLDKVLAVLAALTTAKPEDFPLLHRF |
| | SMFVRPHHKQRFSQICIDLIGRPYPGMEPPGPQEERLAVPPVLTHRAPQPGPSRSEKTGK |
| | TQSKISSFLRQRPAGTVGAGGEDAGPSQSSGPPHGPAASEWGL (RTEL Isoform 2 |
| | CCDS 13530.3) (SEQ ID NO: 230) |
| | MPKIVLNGVTVDFPFQPYKCQQEYMTKVLECLQQKVNGILESPTGTGKTLCLLCTTLAWR |
| | EHLRDGISARKIAERAQGELFPDRALSSWGNAAAAAGDPIACYTDIPKIIYASRTHSQLT |
| | QVINELRNTSYRPKVCVLGSREQLCIHPEVKKQESNHLQIHLCRKKVASRSCHFYNNVEE |
| | KSLEQELASPILDIEDLVKSGSKHRVCPYYLSRNLKQQADIIFMPYNYLLDAKSRRAHNI |
| | DLKGTVVIFDEAHNVEKMCEESASFDLTPHDLASGLDVIDQVLEEQTKAAQQGEPHPEFS |
| | ADSPSPGLNMELEDIAKLKMILLRLEGAIDAVELPGDDSGVTKPGSYIFELFAEAQITFQ |
| | TKGCILDSLDQIIQHLAGRAGVFTNTAGLQKLADIIQIVFSVDPSEGSPGSPAGLGALQS |
| | YKVHIHPDAGHRRTAQRSDAWSTTAARKRGKVLSYWCFSPGHSMHELVRQGVRSLILTSG |
| | TLAPVSSFALEMQIPFPVCLENPHIIDKHQIWVGVVPRGPDGAQLSSAFDRRFSEECLSS |
| | LGKALGNIARVVPYGLLIFFPSYPVMEKSLEFWRARDLARKMEALKPLFVEPRSKGSFSE |
| | TISAYYARVAAPGSTGATFLAVCRGKASEGLDFSDTNGRGVIVTGLPYPPRMDPRVVLKM |
| | QFLDEMKGQGGAGGQFLSGQEWYRQQASRAVNQAIGRVIRHRQDYGAVFLCDHRFAFADA |
| | RAQLPSWVRPHVRVYDNFGHVIRDVAQFFRVAERTMPAPAPRATAPSVRGEDAVSEAKSP |
| | GPFFSTRKAKSLDLHVPSLKQRSSGSPAAGDPESSLCVEYEQEPVPARQRPRGLLAALEH |
| | SEQRAGSPGEEQAHSCSTLSLLSEKRPAEEPRGGRKKIRLVSHPEEPVAGAQTDRAKLFM |
| | VAVKQELSQANFATFTQALQDYKGSDDFAALAACLGPLFAEDPKKHNLLQGFYQFVRPHH |
| | KQQFEEVCIQLTGRGCGYRPEHSIPRRQRAQPVLDPTGRTAPDPKLTVSTAAAQQLDPQE |
| | HLNQGRPHLSPRPPPTGDPGSQPQWGSGVPRAGKQGQHAVSAYLADARRALGSAGCSQLL |
| | AALTAYKQDDDLDKVLAVLAALTTAKPEDFPLLHRFSMFVRPHHKQRFSQTCTDLTGRPY |
| | PGMEPPGPQEERLAVPPVLTHRAPQPGPSRSEKTGKTQSKISSFLRQRPAGTVGAGGEDA |
| | GPSQSSGPPHGPAASEWGEPHGRDIAGQQATGAPGGPLSAGCVCQGCGAEDVVPFQCPAC |
| | DFQRCQACWQRHLQASRMCPACHTASRKQSVMQVFWPEPQ (RTEL Isoform 3 |
| | CCDS 63331.1) (SEQ ID NO: 231) |
| | MPYNYLLDAKSRRAHNIDLKGTVVIFDEAHNVEKMCEESASFDLTPHDLASGLDVIDQVL |
| | EEQTKAAQQGEPHPEFSADSPSPGLNMELEDIAKLKMILLRLEGAIDAVELPGDDSGVTK |
| | PGSYIFELFAEAQITFQTKGCILDSLDQIIQHLAGRAGVFTNTAGLQKLADIIQIVFSVD |
| | PSEGSPGSPAGLGALQSYKVHIHPDAGHRRTAQRSDAWSTTAARKRGKVLSYWCFSPGHS |
| | MHELVRQGVRSLILTSGTLAPVSSFALEMQIPFPVCLENPHIIDKHQIWVGVVPRGPDGA |
| | QLSSAFDRRFSEECLSSLGKALGNIARVVPYGLLIFFPSYPVMEKSLEFWRARDLARKME |
| | ALKPLFVEPRSKGSFSETISAYYARVAAPGSTGATFLAVCRGKASEGLDFSDTNGRGVIV |
| | TGLPYPPRMDPRVVLKMQFLDEMKGQGGAGGQFLSGQEWYRQQASRAVNQAIGRVIRHRQ |
| | DYGAVFLCDHRFAFADARAQLPSWVRPHVRVYDNFGHVIRDVAQFFRVAERTMPAPAPRA |
| | TAPSVRGEDAVSEAKSPGPFFSTRKAKSLDLHVPSLKQRSSGSPAAGDPESSLCVEYEQE |
| | PVPARQRPRGLLAALEHSEQRAGSPGEEQAHSCSTLSLLSEKRPAEEPRGGRKKIRLVSH |
| | PEEPVAGAQTDRAKLFMVAVKQELSQANFATFTQALQDYKGSDDFAALAACLGPLFAEDP |
| | KKHNLLQGFYQFVRPHHKQQFEEVCIQLTGRGCGYRPEHSIPRRQRAQPVLDPTGRTAPD |
| | PKLTVSTAAAQQLDPQEHLNQGRPHLSPRPPPTGDPGSQPQWGSGVPRAGKQGQHAVSAY |
| | LADARRALGSAGCSQLLAALTAYKQDDDLDKVLAVLAALTTAKPEDFPLLHRFSMFVRPH |
| | HKQRFSQTCTDLTGRPYPGMEPPGPQEERLAVPPVLTHRAPQPGPSRSEKTGKTQSKISS |
| | FLRQRPAGTVGAGGEDAGPSQSSGPPHGPAASEWGL (RTEL Isoform 4 CCDS |
| | 74751.1) (SEQ ID NO: 232) |
| Rap80 | >sp\|Q96RL1\|UIMC1_HUMAN BRCA1-A complex |
| | subunit RAP80 OS = Homo sapiens GN = UIMC1 PE = 1 SV = 2 |
| | (SEQ ID NO: 233) |
| | MPRRKKKVKEVSESRNLEKKDVETTSSVSVKRKRRLEDAFIVISDSDGEEPKEENGLQKT |
| | KTKQSNRAKCLAKRKIAQMTEEEQFALALKMSEQEAREVNSQEEEEEELLRKAIAESLNS |
| | CRPSDASATRSRPLATGPSSQSHQEKTTDSGLTEGIWQLVPPSLFKGSHISQGNEAEERE |
| | EPWDHTEKTEEEPVSGSSGSWDQSSQPVFENVNVKSFDRCTGHSAEHTQCGKPQESTGRG |
| | SAFLKAVQGSGDTSRHCLPTLADAKGLQDTGGTVNYFWGIPFCPDGVDPNQYTKVILCQL |
| | EVYQKSLKMAQRQLLNKKGFGEPVLPRPPSLIQNECGQGEQASEKNECISEDMGDEDKEE |
| | RQESRASDWHSKTKDFQESSIKSLKEKLLLEEEPTTSHGQSSQGIVEETSEEGNSVPASQ |
| | SVAALTSKRSLVLMPESSAEEITVCPETQLSSSETFDLEREVSPGSRDILDGVRIIMADK |
| | EVGNKEDAEKEVAISTFSSSNQVSCPLCDQCFPPTKIERHAMYCNGLMEEDTVLIRRQKE |
| | AKTKSDSGTAAQTSLDIDKNEKCYLCKSLVPFREYQCHVDSCLQLAKADQGDGPEGSGRA |
| | CSTVEGKWQQRLKNPKEKGHSEGRLLSFLEQSEHKTSDADIKSSETGAFRVPSPGMEEAG |
| | CSREMQSSFTRRDLNESPVKSFVSISEATDCLVDFKKQVTVQPGSRTRTKAGRGRRRKF |
| | >sp\|Q96RL1\|UIMC1_HUMAN BRCA1-A complex |
| | subunit RAP80 OS = Homo sapiens GN = UIMC1 PE = 1 SV = 2 |
| | (SEQ ID NO: 234) |
| | MPRRKKKVKEVSESRNLEKKDVETTSSVSVKRKRRLEDAFIVISDSDGEEPKEENGLQKT |
| | KTKQSNRAKCLAKRKIAQMTEEEQFALALKMSEQEAREVNSQEEEEEELLRKAIAESLNS |
| | CRPSDASATRSRPLATGPSSQSHQEKTTDSGLTEGIWQLVPPSLFKGSHISQGNEAEERE |
| | EPWDHTEKTEEEPVSGSSGSWDQSSQPVFENVNVKSFDRCTGHSAEHTQCGKPQESTGRG |
| | SAFLKAVQGSGDTSRHCLPTLADAKGLQDTGGTVNYFWGIPFCPDGVDPNQYTKVILCQL |
| | EVYQKSLKMAQRQLLNKKGFGEPVLPRPPSLIQNECGQGEQASEKNECISEDMGDEDKEE |
| | RQESRASDWHSKTKDFQESSIKSLKEKLLLEEEPTTSHGQSSQGIVEETSEEGNSVPASQ |
| | SVAALTSKRSLVLMPESSAEEITVCPETQLSSSETFDLEREVSPGSRDILDGVRIIMADK |
| | EVGNKEDAEKEVAISTFSSSNQVSCPLCDQCFPPTKIERHAMYCNGLMEEDTVLIRRQKE |
| | AKTKSDSGTAAQTSLDIDKNEKCYLCKSLVPFREYQCHVDSCLQLAKADQGDGPEGSGRA |
| | CSTVEGKWQQRLKNPKEKGHSEGRLLSFLEQSEHKTSDADIKSSETGAFRVPSPGMEEAG |
| | CSREMQSSFTRRDLNESPVKSFVSISEATDCLVDFKKQVTVQPGSRTRTKAGRGRRRKF |
| | >sp\|Q96RL1-2\|UIMC1_HUMAN Isoform 2 of BRCA1- |
| | A complex subunit RAP80 OS = Homo sapiens GN = UIMC1 |
| | (SEQ ID NO: 235) |
| | MPRRKKKVKEVSESRNLEKKDVETTSSVSVKRKRRLEDAFIVISDSDGEEPKEENGLQKT |
| | KTKQSNRAKCLAKRKIAQMTEEEQFALALKMSEQEAREVNSQEEEEEELLRKAIAESLNS |
| | CRPSDASATRSRPLATGPSSQSHQEKTTDSGLTEGIWQLVPPSLFKGSHISQGNEAEERE |
| | EPWDHTEKTEEEPVSGSSGSWDQSSQPVFENVNVKSFDRCTGHSAEHTQCGKPQSSQGIV |
| | EETSEEGNSVPASQSVAALTSKRSLVLMPESSAEEITVCPETQLSSSETFDLEREVSPGS |
| | RDILDGVRIIMADKEVGNKEDAEKEVAISTFSSSNQVSCPLCDQCFPPTKIERHAMYCNG |
| | LMEEDTVLTRRQKEAKTKSDSGTAAQTSLDIDKNEKCYLCKSLVPFREYQCHVDSCLQLA |
| | KADQGDGPEGSGRACSTVEGKWQQRLKNPKEKGHSEGRLLSFLEQSEHKTSDADIKSSET |
| | GAFRVPSPGMEEAGCSREMQSSFTRRDLNESPVKSFVSISEATDCLVDFKKQVTVQPGSR |
| | TRTKAGRGRRRKF |
| | >sp\|Q96RL1-3\|UIMC1_HUMAN Isoform 3 of BRCA1- |
| | A complex subunit RAP80 OS = Homo sapiens GN = UIMC1 |
| | (SEQ ID NO: 236) |
| | MTEEEQFALALKMSEQEAREVNSQEEEEEELLRKAIAESLNSCRPSDASATRSRPLATGP |
| | SSQSHQEKTTDSGLTEGIWQLVPPSLFKGSHISQGNEAEEREEPWDHTEKTEEEPVSGSS |
| | GSWDQSSQPVFENVNVKSFDRCTGHSAEHTQCGKPQESTGRGSAFLKAVQGSGDTSRHCL |
| | PTLADAKGLQDTGGIVNYFWGIPFCPDGVDPNQYTKVILCQLEVYQKSLKMAQRQLLNKK |
| | GFGEPVLPRPPSLIQNECGQGEQASEKNECISEDMGDEDKEERQESRASDWHSKTKDFQE |
| | SSIKSLKEKLLLEEEPTTSHGQSSQGIVEETSEEGNSVPASQSVAALTSKRSLVLMPESS |
| | AEEITVCPETQLSSSETFDLEREVSPGSRDILDGVRIIMADKEVGNKEDAEKEVAISTFS |
| | SSNQVSCPLCDQCFPPTKIERHAMYCNGLMEEDTVLIRRQKEAKIKSDSGTAAQTSLDID |
| | KNEKCYLCKSLVPFREYQCHVDSCLQLAKADQGDGPEGSGRACSTVEGKWQQRLKNPKEK |
| | GHSEGRLLSFLEQSEHKTSDADIKSSETGAFRVPSPGMEEAGCSREMQSSFTRRDLNESP |
| | VKSFVSISEATDCLVDFKKQVTVQPGSRTRTKAGRGRRRKF |
| | >sp\|Q96RL1-4\|UIMC1_HUMAN Isoform 4 of BRCA1- |
| | A complex subunit RAP80 OS = Homo sapiens GN = UIMC1 |
| | (SEQ ID NO: 237) |
| | MLPLPDLDLWPLDRLPSPIKRKPQTLGSLKSSQGIVEETSEEGNSVPASQSVAALTSKRS |
| | LVLMPESSAEEITVCPETQLSSSETFDLEREVSPGSRDILDGVRIIMADKEVGNKEDAEK |
| | EVAISTFSSSNQVSCPLCDQCFPPTKIERHAMYCNGLMEEDTVLTRRQKEAKTKSDSGTA |
| | AQTSLDIDKNEKCYLCKSLVPFREYQCHVDSCLQLAKADQGDGPEGSGRACSTVEGKWQQ |
| | RLKNPKEKGHSEGRLLSFLEQSEHKTSDADIKSSETGAFRVPSPGMEEAGCSREMQSSFT |
| | RRDLNESPVKSFVSISEATDCLVDFKKQVTVQPGSRTRTKAGRGRRRKF |
| | >sp\|Q96RL1-5\|UIMC1_HUMAN Isoform 5 of BRCA1- |
| | A complex subunit RAP80 OS = Homo sapiens GN = UIMC1 |
| | (SEQ ID NO: 238) |
| | MPRRKKKVKEVSESRNLEKKDVETTSSVSVKRKRRLEDAFIVISDSDGEEPKEENGLQKT |
| | KTKQSNRAKCLAKRKIAQMTEEEQFALALKMSEQEAREVNSQEEEEEELLRKAIAESLNV |
| | NMPCCKSLWRLISYIFDFCGVVVALGTSCSHL |
| miR-155 | See Table VI.5 |
| miR-545 | See Table VI.5 |
| miR-107 | See Table VI.5 |
| miR-1255 | See Table VI.5 |
| miR-148 | See Table VI.5 |
| miR-193 | See Table VI.5 |

[1344] More specifically, in some embodiments, the down-regulator of an anti-HR pathway is an inhibitor of (e.g., an siRNA against) anti-HR helicase, FBH1, RECQ5, BLM, a RecQ helicase, PARM, Rap80, FANCJ, FANCM, RECQ, or RAD54, or an anti-miR that targets miR-15A, miR-545, miR-107, miR-1255, miR-148, or miR-193, or an agent of Table VI.5, or any combination thereof. In some embodiments, an anti-HR pathway is down regulated using an HDR-enhancing gRNA that targets a component of an anti-HR pathway, e.g., anti-HR helicase, FBH1, RECQ5, BLM, a RecQ helicase, PARI, Rap80, FANCJ, FANCM, RECQP, or RAD54. In some embodiments, the HDR-enhancing gRNA is used in combination with an eiCas9 molecule. In some embodiments, the HDR-enhancing gRNA is used in combination with an eaCas9 molecule. In some embodiments, the HDR-enhancing gRNA is administered to the cell as a HDR-enhancing gRNA:Cas9 molecule complex.

TABLE VI.5
Down-regulators of the anti-HR pathway.
1. Fbh1

| | |
|---|---|
| siRNA | FBXO18 Silencer, sold by Life Technologies |
| | FBXO18 F-box protein, helicase, 18 siRNA, sold by Dharmacon |
| | Commercially available from Dharmacon or Ambion |
| antibodies | Mouse Anti-Fbh1 antibody, monoclonal (2353C1a), |
| | sold by Lifespan Biosciences |
| | Anti-FBXO18/FBH1 antibody (aa748-777) LS-C166079, |
| | sold by Lifespan Biosciences |

2. RTEL

| | |
|---|---|
| siRNA | Commercially available from Dharmacon or Ambion |

3. PARPI

| | |
|---|---|
| siRNA | PMCH Silencer, sold by Life Technologies; |
| | PARPBP PARP1 binding protein siRNA, sold by Dharmacon; |
| | Commercially available from Dharmacon or Ambion |
| antibodies | PARP1 Binding Protein (PARPBP) (C-Term), (AA 522-550) |
| | antibody, sold by Aviva Systems Biology; |
| | PARP1 Binding Protein (PARPBP) (C-Term), (AA 522-550) |
| | antibody, sold by Atlas Antibodies |

4. Rap80

| siRNA | UIMC1 Silencer, sold by Life Technologies; | | | | | |
|---|---|---|---|---|---|---|
| | RAP80 siRNA (h), sold by Santa Cruz Biotechnology | | | | | |
| | Entrez | Entrez | | | | |
| | Gene | Gene | GenBank | Reagent | SEQ | |
| | Symbol | ID | Acc. No. | Source ID | ID | Sequence (sense) |
| | Rap 80 | 51720 | NM_016290 | D-006995-01 | 239 | GAAAAUGGGUUGCAGAAAA |
| | Rap 80 | 51720 | NM_016290 | D-006995-03 | 240 | AGAGGCAGCUCCUUAAUAA |
| | Rap 80 | 51720 | NM_016290 | D-006995-04 | 241 | GCACAAGACUUCAGAUGCA |
| | Rap 80 | 51720 | NM_016290 | D-006995-05 | 242 | GGACACAUCUAGGCACUGU |

| | |
|---|---|
| antibodies | RAP80 Antibody, sold by Bethyl Laboratories; |
| | Anti-RAP80 antibody (EPR5315) (ab124763), sold by Abcam; |
| | RAP80 (C-13) antibody, sold by Santa Cruz Biotechnology; |
| | RAP80 (E-17) antibody, sold by Santa Cruz Biotechnology; |
| | RAP80 (H-260) antibody, sold by Santa Cruz Biotechnology |

5. Anti-miR for:

| | mature miRNA | Anti-miR sequence |
|---|---|---|
| miR-155-5p | UUAAUGCUAAUCGUGAUAGGGGU(243) | ACCCCUAUCACGAUUAGCAUUAA(244) |
| miR-155-3p | CUCCUACAUAUUAGCAUUAACA(245) | UGUUAAUGCUAAUAUGUAGGAG(246) |
| miR-545-5p | UCAGUAAAUGUUUAUUAGAUGA(247) | UCAUCUAAUAAACAUUUACUGA(248) |
| miR-545-3p | UCAGCAAACAUUUAUUGUGUGC(249) | GCACACAAUAAAUGUUUGCUGA(250) |
| miR-107 | AGCAGCAUUGUACAGGGCUAUCA(251) | UGAUAGCCCUGUACAAUGCUGCU(252) |
| miR-1255-A | AGGAUGAGCAAAGAAAGUAGAUU(253) | AAUCUACUUUCUUUGCUCAUCCU(254) |
| miR-1255-B1 | CGGAUGAGCAAAGAAAGUGGUU(255) | AACCACUUUCUUUGCUCAUCCG(256) |
| miR-1255-B2 | CGGAUGAGCAAAGAAAGUGGUU(257) | AACCACUUUCUUUGCUCAUCCG(258) |
| miR-148-5p | AAAGUUCUGAGACACUCCGACU(259) | AGUCGGAGUGUCUCAGAACUUU(260) |
| miR-148-3p | UCAGUGCACUACAGAACUUUGU(261) | ACAAAGUUCUGUAGUGCACUGA(262) |
| miR-193-5p | UGGGUCUUUGCGGGCGAGAUGA(263) | UCAUCUCGCCCGCAAAGACCCA(264) |
| miR-193-3p | AACUGGCCUACAAAGUCCCAGU(265) | ACUGGGACUUUGUAGGCCAGUU(266) |

[1345] In other embodiments, the down-regulator of an HR pathway is an agent that promotes HDR by inhibiting resection. In one embodiment, agents that promotes HDR by inhibiting resection are listed in Table VI.6.

TABLE VI.6
Anti-HR Agents that Promote HDR by Inhibiting Resection
1) CtIP

| | Entrez | Entrez | | | | |
|---|---|---|---|---|---|---|
| | Gene | Gene | GenBank | Reagent Source | SEQ | |
| | Symbol | ID | Acc. No. | ID | ID | Sequence (sense) |
| siRNA | CtIP | 5932 | NM_002894 | D-011376-01 | 267 | GAGCAGACCUUUCUCAGUA |
| | CtIP | 5932 | NM_002894 | D-011376-02 | 268 | GAAGUGAACAAGAUCAUUA |
| | CtIP | 5932 | NM_002894 | D-011376-03 | 269 | CAACCAAGAUGUAUCCUUU |
| | CtIP | 5932 | NM_002894 | D-011376-04 | 270 | GAAUAGGACUGAGUACGGU |
| | CtIP | 5932 | NM_203292 | J-011376-05 | 271 | GGAGCUACCUCUAGUAUCA |
| | CtIP | 5932 | NM_203292 | J-011376-06 | 272 | GAGGUUAUAUUAAGGAAGA |
| | CtIP | 5932 | NM_203292 | J-011376-07 | 273 | GAACAGAAUAGGACUGAGU |
| | CtIP | 5932 | NM_203292 | J-011376-08 | 274 | GCACGUUGCCCAAAGAUUC |
| | CtIP | 5932 | NM_002894 | s11849 | 275 | UUACUUGUAAACCUUGUACtt |
| | CtIP | 5932 | NM_002894 | s11850 | 276 | AAAUCGAUCAGACAGAUCCag |
| | CtIP | 5932 | NM_002894 | s11851 | 277 | UCUUGUUCACUUCAGACCCaa |

2) Exo1

| | |
|---|---|
| siRNA | Commercially available from Dharmacon or Ambion |

3) DNA2

| | |
|---|---|
| siRNA | Commercially available from Dharmacon or Ambion |

4) MRN complex

| Compounds | Phase |
|---|---|
| Mirin | Phase I/II |
| Telomelysin | |
| Resveratrol | |

### VI.3 Canonical Non-Homologous End-Joining (Canonical NHEJ))

[1346] Canonical non-homologous end-joining is a second repair pathway that operates on double-stranded breaks. In contrast to HDR, canonical NHEJ typically acts when a DSB has blunt, unresected ends that are ligation-competent. The canonical NHEJ pathway can involve end processing i.e., deletions and/or fresh synthesis i.e., insertions. It can yield three types of different outcomes: correct repair (error free repair) or approximately 1 to 4 nucleotide insertions or deletions.

[1347] Canonical NHEJ depends on KU70-80 and Xrcc4/Ligase IV. Briefly, the core components of this pathway are KU70-80, DNApk, Artemis nuclease, DNA Polymerase, and ligase IV-XRCC4-XLF (these last 3 work as a complex to ligate ends). The pathway components are discussed below in more detail.

[1348] After a DSB forms, the toroidal heterodimer Ku70/Ku80 loads and then activates DNA-PKcs. DNA-PKcs stabilizes the DNA ends, preventing resection, and thus promotes canonical NHEJ over HDR and other DSB repair pathways. 53BP1 may also increase the stability of DSBs, thereby promoting canonical NHEJ. RIF1 and PTIP assist 53BP1 in this function. 53BP1 may also increase DSB mobility, allowing the DNA ends to find each other as is required for ligation. 53BP1, Rif1, and PTIP are not members of the core canonical NHEJ pathway. Rather, they act upstream of it, and regulate whether the core canonical NHEJ machinery engages at all. 53BP1, Rif1, and PTIP are anti-resection proteins.

[1349] To catalyze repair, XRCC4/LIG4 is recruited. If both ends are blunt and ligatable, a trimer of XRCC4, and LIG4 and XLF (a stimulatory factor) ligate the ends together. If ligation is not possible, an end-processing enzyme such as ARTEMIS or an APLF nuclease or the PNK kinase/phosphatase can transform the break into a substrate for ligation. Artemis, also known as DCLRElC (DNA cross-link repair 1C), has endonuclease activity on 5′ and 3′ overhangs, and a 5′ to 3′ exonuclease activity.

[1350] In some embodiments, HDR can be promoted by down-regulating a canonical NHEJ pathway. In some embodiments, a Cas9 molecule and gRNA can induce a DSB in a desired location during G1 or another phase of the cycle. This DSB can be formed using, e.g., one Cas9 molecule with the ability to produce DSBs, or two nickases. A canonical NHEJ down-regulator prevents repair of a DSB in G1. While in some cases that break might be repaired by, e.g., MMEJ, in other cases it will persist until S/G2, when HDR becomes active. A template nucleic acid can be added to the cell, so that the HDR machinery repairs the DSB using the template nucleic acid.

[1351] Accordingly, in some embodiments, the methods described herein involve down-regulating a canonical NHEJ pathway in order to promote HDR. For instance, the methods may involve modulating, e.g., inhibiting, a component (e.g., exactly one component, or one or more components, e.g., two or three components) of the canonical NHEJ pathway, e.g., a component of Table VI.7, VI.1(A), or VI.1(B). More specifically, in some embodiments, the methods described herein may involve modulating, e.g., inhibiting, exactly one of, or one or more of a Ku protein, Ku70, Ku80, DNA Pk, DNA-PKcs, 53BP1, XRCC4, LIG4, XLF, ARTEMIS, an APLF, or PNK. In some embodiments, the methods described herein may involve inhibiting an anti-resection protein, e.g., one or more of 53BP1, Rif1, and PTIP, in order to promote repair by HDR rather than canonical NHEJ. Up-regulation of HDR, in some embodiments, is achieved using siRNA directed against one or more of a Ku protein, Ku70, Ku80, DNA Pk, DNA-PKcs, 53BP1, XRCC4, LIG4, XLF, ARTEMIS, an APLF, PNK, Rif1, or PTIP. In some embodiments, a canonical NHEJ pathway is down regulated using an HDR-enhancing gRNA that targets a component of a canonical NHEJ pathway, e.g., one or more of a Ku protein, Ku70, Ku80, DNA Pk, DNA-PKcs, 53BP1, XRCC4, LIG4, XLF, ARTEMIS, an APLF, PNK, Rif1, or PTIP. In some embodiments, the HDR-enhancing gRNA is used in combination with an eiCas9 molecule. In some embodiments, the HDR-enhancing gRNA is used in combination with an eaCas9 molecule. In some embodiments, the HDR-enhancing gRNA is administered to the cell as a HDR-enhancing gRNA:Cas9 molecule complex. In another embodiment, the up-regulator of HDR is a dominant negative CtIP. A dominant negative CtIP promotes resection in G1 phase.

[1352] In some embodiments, one or more of HDR, alt-HR, anti-HR, MMEJ, SSA, SSBR, MMR, NER, and BER are not substantially down-regulated, e.g., the only DNA damage repair pathway to be substantially down-regulated is the canonical NHEJ pathway.

TABLE VI.7
Factors that promote canonical NHEJ

| Factor | Sequence |
|---|---|
| a Ku protein | — |
| Ku70 (also called | >sp\|P12956\|XRCC6_HUMAN X-ray repair cross-complementing protein 6 |
| XRCC6) | OS = Homo sapiens GN = XRCC6 PE = 1 SV = 2 (SEQ ID NO: 278) |
| | MSGWESYYKTEGDEEAEEEQEENLEASGDYKYSGRDSLIFLVDASKAMFESQSEDELTPF |
| | DMSIQCIQSVYISKIISSDRDLLAVVFYGTEKDKNSVNFKNIYVLQELDNPGAKRILELD |
| | QFKGQQGQKRFQDMMGHGSDYSLSEVLWVCANLFSDVQFKMSHKRIMLFTNEDNPHGNDS |
| | AKASRARTKAGDLRDTGIFLDLMHLKKPGGFDISLFYRDIISIAEDEDLRVHFEESSKLE |
| | DLLRKVRAKETRKRALSRLKLKLNKDIVISVGIYNLVQKALKPPPIKLYRETNEPVKTKT |
| | RTFNTSTGGLLLPSDTKRSQIYGSRQIILEKEETEELKRFDDPGLMLMGFKPLVLLKKHH |
| | YLRPSLFVYPEESLVIGSSTLFSALLIKCLEKEVAALCRYTPRRNIPPYFVALVPQEEEL |
| | DDQKIQVTPPGFQLVFLPFADDKRKMPFTEKIMATPEQVGKMKAIVEKLRFTYRSDSFEN |
| | PVLQQHFRNLEALALDLMEPEQAVDLTLPKVEAMNKRLGSLVDEFKELVYPPDYNPEGKV |
| | TKRKHDNEGSGSKRPKVEYSEEELKTHISKGTLGKFTVPMLKEACRAYGLKSGLKKQELL |
| | EALTKHFQD |
| | >sp\|P12956-2\|XRCC6_HUMAN Isoform 2 of X-ray repair cross- |
| | complementing protein 6 OS = Homo sapiens GN = XRCC6 (SEQ ID |
| | NO: 279) |
| | MSGWESYYKTEGDEEAEEEQEENLEASGDYKYSGRDSLIFLVDASKAMFESQSEDELTPF |
| | DMSIQELDNPGAKRILELDQFKGQQGQKRFQDMMGHGSDYSLSEVLWVCANLFSDVQFKM |
| | SHKRIMLFTNEDNPHGNDSAKASRARTKAGDLRDTGIFLDLMHLKKPGGFDISLFYRDII |
| | SIAEDEDLRVHFEESSKLEDLLRKVRAKETRKRALSRLKLKLNKDIVISVGIYNLVQKAL |
| | KPPPIKLYRETNEPVKIKTRIFNISIGGLLLPSDTKRSQIYGSRQIILEKEETEELKRFD |
| | DPGLMLMGFKPLVLLKKHHYLRPSLFVYPEESLVIGSSTLFSALLIKCLEKEVAALCRYT |
| | PRRNIPPYFVALVPQEEELDDQKIQVIPPGFQLVFLPFADDKRKMPFTEKIMATPEQVGK |
| | MKAIVEKLRFTYRSDSFENPVLQQHFRNLEALALDLMEPEQAVDLTLPKVEAMNKRLGSL |
| | VDEFKELVYPPDYNPEGKVIKRKHDNEGSGSKRPKVEYSEEELKTHISKGILGKFTVPML |
| | KEACRAYGLKSGLKKQELLEALTKHFQD |
| Ku80 | >sp\|P13010\|XRCC5_HUMAN X-ray repair cross-complementing protein 5 |
| | OS = Homo sapiens GN = XRCC5 PE = 1 SV = 3 (SEQ ID NO: 280) |
| | MVRSGNKAAVVLCMDVGFTMSNSIPGIESPFEQAKKVITMFVQRQVFAENKDEIALVLFG |
| | TDGIDNPLSGGDQYQNITVHRHLMLPDFDLLEDIESKIQPGSQQADFLDALIVSMDVIQH |
| | ETIGKKFEKRHIEIFIDLSSRFSKSQLDIIIHSLKKCDISLQFFLPFSLGKEDGSGDRGD |
| | GPFRLGGHGPSFPLKGITEQQKEGLEIVKMVMISLEGEDGLDEIYSFSESLRKLCVFKKI |
| | ERHSIHWPCRLTIGSNLSIRIAAYKSILQERVKKTWTVVDAKTLKKEDIQKETVYCLNDD |
| | DETEVLKEDIIQGFRYGSDIVPFSKVDEEQMKYKSEGKCFSVLGFCKSSQVQRRFFMGNQ |
| | VLKVFAARDDEAAAVALSSLIHALDDLDMVAIVRYAYDKRANPQVGVAFPHIKHNYECLV |
| | YVQLPFMEDLRQYMFSSLKNSKKYAPTEAQLNAVDALIDSMSLAKKDEKTDTLEDLFPTT |
| | KIPNPRFQRLFQCLLHRALHPREPLPPIQQHIWNMLNPPAEVTTKSQIPLSKIKTLFPLI |
| | EAKKKDQVTAQEIFQDNHEDGPTAKKLKTEQGGAHFSVSSLAEGSVTSVGSVNPAENFRV |
| | LVKQKKASFEEASNQLINHIEQFLDTNETPYFMKSIDCIRAFREEAIKFSEEQRFNNFLK |
| | ALQEKVEIKQLNHFWEIVVQDGITLITKEEASGSSVTAEEAKKFLAPKDKPSGDTAAVFE |
| | EGGDVDDLLDMI |
| DNA Pk | — |
| DNA-PKcs | >sp\|P78527\|PRKDC_HUMAN DNA-dependent protein kinase catalytic |
| | subunit OS = Homo sapiens GN = PRKDC PE = 1 SV = 3 (SEQ ID |
| | NO: 281) |
| | MAGSGAGVRCSLLRLQETLSAADRCGAALAGHQLIRGLGQECVLSSSPAVLALQTSLVFS |
| | RDFGLLVFVRKSLNSIEFRECREEILKFLCIFLEKMGQKIAPYSVEIKNTCTSVYTKDRA |
| | AKCKIPALDLLIKLLQTFRSSRLMDEFKIGELFSKFYGELALKKKIPDTVLEKVYELLGL |
| | LGEVHPSEMINNAENLFRAFLGELKTQMTSAVREPKLPVLAGCLKGLSSLLCNFTKSMEE |
| | DPQTSREIFNFVLKAIRPQIDLKRYAVPSAGLRLFALHASQFSTCLLDNYVSLFEVLLKW |
| | CAHTNVELKKAALSALESFLKQVSNMVAKNAEMHKNKLQYFMEQFYGIIRNVDSNNKELS |
| | IAIRGYGLFAGPCKVINAKDVDFMYVELIQRCKQMFLTQTDTGDDRVYQMPSFLQSVASV |
| | LLYLDTVPEVYTPVLEHLVVMQIDSFPQYSPKMQLVCCRAIVKVFLALAAKGPVLRNCIS |
| | TVVHQGLIRICSKPVVLPKGPESESEDHRASGEVRTGKWKVPTYKDYVDLFRHLLSSDQM |
| | MDSILADEAFFSVNSSSESLNHLLYDEFVKSVLKIVEKLDLTLEIQTVGEQENGDEAPGV |
| | WMIPTSDPAANLHPAKPKDFSAFINLVEFCREILPEKQAEFFEPWVYSFSYELILQSTRL |
| | PLISGFYKLLSITVRNAKKIKYFEGVSPKSLKHSPEDPEKYSCFALFVKFGKEVAVKMKQ |
| | YKDELLASCLTFLLSLPHNIIELDVRAYVPALQMAFKLGLSYTPLAEVGLNALEEWSIYI |
| | DRHVMQPYYKDILPCLDGYLKTSALSDETKNNWEVSALSRAAQKGFNKVVLKHLKKTKNL |
| | SSNEAISLEEIRIRVVQMLGSLGGQINKNLLTVTSSDEMMKSYVAWDREKRLSFAVPFRE |
| | MKPVIFLDVFLPRVTELALTASDRQTKVAACELLHSMVMFMLGKATQMPEGGQGAPPMYQ |
| | LYKRTFPVLLRLACDVDQVTRQLYEPLVMQLIHWFTNNKKFESQDTVALLEAILDGIVDP |
| | VDSTLRDFCGRCIREFLKWSIKQITPQQQEKSPVNTKSLFKRLYSLALHPNAFKRLGASL |
| | AFNNIYREFREEESLVEQFVFEALVIYMESLALAHADEKSLGTIQQCCDAIDHLCRIIEK |
| | KHVSLNKAKKRRLPRGFPPSASLCLLDLVKWLLAHCGRPQTECRHKSIELFYKFVPLLPG |
| | NRSPNLWLKDVLKEEGVSFLINTFEGGGCGQPSGILAQPTLLYLRGPFSLQATLCWLDLL |
| | LAALECYNTFIGERTVGALQVLGTEAQSSLLKAVAFFLESIAMHDIIAAEKCFGTGAAGN |
| | RTSPQEGERYNYSKCTVVVRIMEFTTTLLNTSPEGWKLLKKDLCNTHLMRVLVQTLCEPA |
| | SIGFNIGDVQVMAHLPDVCVNLMKALKMSPYKDILETHLREKITAQSIEELCAVNLYGPD |
| | AQVDRSRLAAVVSACKQLHRAGLLHNILPSQSTDLHHSVGTELLSLVYKGIAPGDERQCL |
| | PSLDLSCKQLASGLLELAFAFGGLCERLVSLLLNPAVLSTASLGSSQGSVIHFSHGEYFY |
| | SLFSETINTELLKNLDLAVLELMQSSVDNTKMVSAVLNGMLDQSFRERANQKHQGLKLAT |
| | TILQHWKKCDSWWAKDSPLETKMAVLALLAKILQIDSSVSFNTSHGSFPEVFTTYISLLA |
| | DTKLDLHLKGQAVTLLPFFTSLTGGSLEELRRVLEQLIVAHFPMQSREFPPGTPRFNNYV |
| | DCMKKFLDALELSQSPMLLELMTEVLCREQQHVMEELFQSSFRRIARRGSCVTQVGLLES |
| | VYEMFRKDDPRLSFTRQSFVDRSLLTLLWHCSLDALREFFSTIVVDAIDVLKSRFTKLNE |
| | STFDTQITKKMGYYKILDVMYSRLPKDDVHAKESKINQVFHGSCITEGNELTKTLIKLCY |
| | DAFTENMAGENQLLERRRLYHCAAYNCAISVICCVFNELKFYQGFLFSEKPEKNLLIFEN |
| | LIDLKRRYNFPVEVEVPMERKKKYIEIRKEAREAANGDSDGPSYMSSLSYLADSTLSEEM |
| | SQFDFSTGVQSYSYSSQDPRPATGRFRRREQRDPTVHDDVLELEMDELNRHECMAPLTAL |
| | VKHMHRSLGPPQGEEDSVPRDLPSWMKFLHGKLGNPIVPLNIRLFLAKLVINTEEVFRPY |
| | AKHWLSPLLQLAASENNGGEGIHYMVVEIVATILSWTGLATPTGVPKDEVLANRLLNFLM |
| | KHVFHPKRAVFRHNLEIIKTLVECWKDCLSIPYRLIFEKFSGKDPNSKDNSVGIQLLGIV |
| | MANDLPPYDPQCGIQSSEYFQALVNNMSFVRYKEVYAAAAEVLGLILRYVMERKNILEES |
| | LCELVAKQLKQHQNTMEDKFIVCLNKVTKSFPPLADRFMNAVFFLLPKFHGVLKTLCLEV |
| | VLCRVEGMTELYFQLKSKDFVQVMRHRDDERQKVCLDIIYKMMPKLKPVELRELLNPVVE |
| | FVSHPSTTCREQMYNILMWIHDNYRDPESETDNDSQEIFKLAKDVLIQGLIDENPGLQLI |
| | IRNFWSHETRLPSNTLDRLLALNSLYSPKIEVHFLSLATNFLLEMTSMSPDYPNPMFEHP |
| | LSECEFQEYTIDSDWRFRSTVLTPMFVETQASQGTLQTRTQEGSLSARWPVAGQIRATQQ |
| | QHDFTLTQTADGRSSFDWLTGSSTDPLVDHTSPSSDSLLFAHKRSERLQRAPLKSVGPDF |
| | GKKRLGLPGDEVDNKVKGAAGRTDLLRLRRRFMRDQEKLSLMYARKGVAEQKREKEIKSE |
| | LKMKQDAQVVLYRSYRHGDLPDIQIKHSSLITPLQAVAQRDPIIAKQLFSSLFSGILKEM |
| | DKFKTLSEKNNITQKLLQDFNRFLNTTFSFFPPFVSCIQDISCQHAALLSLDPAAVSAGC |
| | LASLQQPVGIRLLEEALLRLLPAELPAKRVRGKARLPPDVLRWVELAKLYRSIGEYDVLR |
| | GIFTSEIGTKQITQSALLAEARSDYSEAAKQYDEALNKQDWVDGEPTEAEKDFWELASLD |
| | CYNHLAEWKSLEYCSTASIDSENPPDLNKIWSEPFYQETYLPYMIRSKLKLLLQGEADQS |
| | LLTFIDKAMHGELQKAILELHYSQELSLLYLLQDDVDRAKYYIQNGIQSFMQNYSSIDVL |
| | LHQSRLTKLQSVQALTEIQEFISFISKQGNLSSQVPLKRLLNTWTNRYPDAKMDPMNIWD |
| | DIITNRCFFLSKIEEKLTPLPEDNSMNVDQDGDPSDRMEVQEQEEDISSLIRSCKFSMKM |
| | KMIDSARKQNNFSLAMKLLKELHKESKTRDDWLVSWVQSYCRLSHCRSRSQGCSEQVLTV |
| | LKTVSLLDENNVSSYLSKNILAFRDQNILLGTTYRIIANALSSEPACLAEIEEDKARRIL |
| | ELSGSSSEDSEKVIAGLYQRAFQHLSEAVQAAEEEAQPPSWSCGPAAGVIDAYMTLADFC |
| | DQQLRKEEENASVIDSAELQAYPALVVEKMLKALKLNSNEARLKFPRLLQIIERYPEETL |
| | SLMTKEISSVPCWQFISWISHMVALLDKDQAVAVQHSVEEITDNYPQAIVYPFIISSESY |
| | SFKDTSTGHKNKEFVARIKSKLDQGGVIQDFINALDQLSNPELLFKDWSNDVRAELAKTP |
| | VNKKNIEKMYERMYAALGDPKAPGLGAFRRKFIQTFGKEFDKHFGKGGSKLLRMKLSDFN |
| | DITNMLLLKMNKDSKPPGNLKECSPWMSDFKVEFLRNELEIPGQYDGRGKPLPEYHVRIA |
| | GFDERVTVMASLRRPKRIIIRGHDEREHPFLVKGGEDLRQDQRVEQLFQVMNGILAQDSA |
| | CSQRALQLRTYSVVPMTSRLGLIEWLENTVTLKDLLLNTMSQEEKAAYLSDPRAPPCEYK |
| | DWLTKMSGKHDVGAYMLMYKGANRTETVTSFRKRESKVPADLLKRAFVRMSTSPEAFLAL |
| | RSHFASSHALICISHWILGIGDRHLNNFMVAMETGGVIGIDFGHAFGSATQFLPVPELMP |
| | FRLTRQFINLMLPMKETGLMYSIMVHALRAFRSDPGLLTNTMDVFVKEPSFDWKNFEQKM |
| | LKKGGSWIQEINVAEKNWYPRQKICYAKRKLAGANPAVITCDELLLGHEKAPAFRDYVAV |
| | ARGSKDHNIRAQEPESGLSEETQVKCLMDQATDPNILGRTWEGWEPWM |
| | >sp\|P78527-2\|PRKDC_HUMAN Isoform 2 of DNA-dependent protein |
| | kinase catalytic subunit OS = Homo sapiens GN = PRKDC |
| | (SEQ ID NO: 282) |
| | MAGSGAGVRCSLLRLQETLSAADRCGAALAGHQLIRGLGQECVLSSSPAVLALQTSLVFS |
| | RDFGLLVFVRKSLNSIEFRECREEILKFLCIFLEKMGQKIAPYSVEIKNTCTSVYTKDRA |
| | AKCKIPALDLLIKLLQTFRSSRLMDEFKIGELFSKFYGELALKKKIPDTVLEKVYELLGL |
| | LGEVHPSEMINNAENLFRAFLGELKTQMTSAVREPKLPVLAGCLKGLSSLLCNFTKSMEE |
| | DPQTSREIFNFVLKAIRPQIDLKRYAVPSAGLRLFALHASQFSTCLLDNYVSLFEVLLKW |
| | CAHTNVELKKAALSALESFLKQVSNMVAKNAEMHKNKLQYFMEQFYGIIRNVDSNNKELS |
| | IAIRGYGLFAGPCKVINAKDVDFMYVELIQRCKQMFLTQTDTGDDRVYQMPSFLQSVASV |
| | LLYLDTVPEVYTPVLEHLVVMQIDSFPQYSPKMQLVCCRAIVKVFLALAAKGPVLRNCIS |
| | TVVHQGLIRICSKPVVLPKGPESESEDHRASGEVRTGKWKVPTYKDYVDLFRHLLSSDQM |
| | MDSILADEAFFSVNSSSESLNHLLYDEFVKSVLKIVEKLDLTLEIQTVGEQENGDEAPGV |
| | WMIPTSDPAANLHPAKPKDFSAFINLVEFCREILPEKQAEFFEPWVYSFSYELILQSTRL |
| | PLISGFYKLLSITVRNAKKIKYFEGVSPKSLKHSPEDPEKYSCFALFVKFGKEVAVKMKQ |
| | YKDELLASCLTFLLSLPHNIIELDVRAYVPALQMAFKLGLSYTPLAEVGLNALEEWSIYI |
| | DRHVMQPYYKDILPCLDGYLKTSALSDETKNNWEVSALSRAAQKGFNKVVLKHLKKTKNL |
| | SSNEAISLEEIRIRVVQMLGSLGGQINKNLLTVTSSDEMMKSYVAWDREKRLSFAVPFRE |
| | MKPVIFLDVFLPRVTELALTASDRQTKVAACELLHSMVMFMLGKATQMPEGGQGAPPMYQ |
| | LYKRTFPVLLRLACDVDQVTRQLYEPLVMQLIHWFTNNKKFESQDTVALLEAILDGIVDP |
| | VDSTLRDFCGRCIREFLKWSIKQITPQQQEKSPVNTKSLFKRLYSLALHPNAFKRLGASL |
| | AFNNIYREFREEESLVEQFVFEALVIYMESLALAHADEKSLGTIQQCCDAIDHLCRIIEK |
| | KHVSLNKAKKRRLPRGFPPSASLCLLDLVKWLLAHCGRPQTECRHKSIELFYKFVPLLPG |
| | NRSPNLWLKDVLKEEGVSFLINTFEGGGCGQPSGILAQPTLLYLRGPFSLQATLCWLDLL |
| | LAALECYNTFIGERTVGALQVLGTEAQSSLLKAVAFFLESIAMHDIIAAEKCFGTGAAGN |
| | RTSPQEGERYNYSKCTVVVRIMEFTTTLLNTSPEGWKLLKKDLCNTHLMRVLVQTLCEPA |
| | SIGFNIGDVQVMAHLPDVCVNLMKALKMSPYKDILETHLREKITAQSIEELCAVNLYGPD |
| | AQVDRSRLAAVVSACKQLHRAGLLHNILPSQSTDLHHSVGTELLSLVYKGIAPGDERQCL |
| | PSLDLSCKQLASGLLELAFAFGGLCERLVSLLLNPAVLSTASLGSSQGSVIHFSHGEYFY |
| | SLFSETINTELLKNLDLAVLELMQSSVDNTKMVSAVLNGMLDQSFRERANQKHQGLKLAT |
| | TILQHWKKCDSWWAKDSPLETKMAVLALLAKILQIDSSVSFNTSHGSFPEVFTTYISLLA |
| | DTKLDLHLKGQAVTLLPFFTSLTGGSLEELRRVLEQLIVAHFPMQSREFPPGTPRFNNYV |
| | DCMKKFLDALELSQSPMLLELMTEVLCREQQHVMEELFQSSFRRIARRGSCVTQVGLLES |
| | VYEMFRKDDPRLSFTRQSFVDRSLLTLLWHCSLDALREFFSTIVVDAIDVLKSRFTKLNE |
| | STFDTQITKKMGYYKILDVMYSRLPKDDVHAKESKINQVFHGSCITEGNELTKTLIKLCY |
| | DAFTENMAGENQLLERRRLYHCAAYNCAISVICCVFNELKFYQGFLFSEKPEKNLLIFEN |
| | LIDLKRRYNFPVEVEVPMERKKKYIEIRKEAREAANGDSDGPSYMSSLSYLADSTLSEEM |
| | SQFDFSTGVQSYSYSSQDPRPATGRFRRREQRDPTVHDDVLELEMDELNRHECMAPLTAL |
| | VKHMHRSLGPPQGEEDSVPRDLPSWMKFLHGKLGNPIVPLNIRLFLAKLVINTEEVFRPY |
| | AKHWLSPLLQLAASENNGGEGIHYMVVEIVATILSWTGLATPTGVPKDEVLANRLLNFLM |
| | KHVFHPKRAVFRHNLEIIKTLVECWKDCLSIPYRLIFEKFSGKDPNSKDNSVGIQLLGIV |
| | MANDLPPYDPQCGIQSSEYFQALVNNMSFVRYKEVYAAAAEVLGLILRYVMERKNILEES |
| | LCELVAKQLKQHQNTMEDKFIVCLNKVTKSFPPLADRFMNAVFFLLPKFHGVLKTLCLEV |
| | VLCRVEGMTELYFQLKSKDFVQVMRHRDDERQKVCLDIIYKMMPKLKPVELRELLNPVVE |
| | FVSHPSTTCREQMYNILMWIHDNYRDPESETDNDSQEIFKLAKDVLIQGLIDENPGLQLI |
| | IRNFWSHETRLPSNTLDRLLALNSLYSPKIEVHFLSLATNFLLEMTSMSPDYPNPMFEHP |
| | LSECEFQEYTIDSDWRFRSTVLTPMFVETQASQGTLQTRTQEGSLSARWPVAGQIRATQQ |
| | QHDFTLTQTADGRSSFDWLTGSSTDPLVDHTSPSSDSLLFAHKRSERLQRAPLKSVGPDF |
| | GKKRLGLPGDEVDNKVKGAAGRTDLLRLRRRFMRDQEKLSLMYARKGVAEQKREKEIKSE |
| | LKMKQDAQVVLYRSYRHGDLPDIQIKHSSLITPLQAVAQRDPIIAKQLFSSLFSGILKEM |
| | DKFKTLSEKNNITQKLLQDFNRFLNTTFSFFPPFVSCIQDISCQHAALLSLDPAAVSAGC |
| | LASLQQPVGIRLLEEALLRLLPAELPAKRVRGKARLPPDVLRWVELAKLYRSIGEYDVLR |
| | GIFTSEIGTKQITQSALLAEARSDYSEAAKQYDEALNKQDWVDGEPTEAEKDFWELASLD |
| | CYNHLAEWKSLEYCSTASIDSENPPDLNKIWSEPFYQETYLPYMIRSKLKLLLQGEADQS |
| | LLTFIDKAMHGELQKAILELHYSQELSLLYLLQDDVDRAKYYIQNGIQSFMQNYSSIDVL |
| | LHQSRLTKLQSVQALTEIQEFISFISKQGNLSSQVPLKRLLNTWTNRYPDAKMDPMNIWD |
| | DIITNRCFFLSKIEEKLTPLPEDNSMNVDQDGDPSDRMEVQEQEEDISSLIRSCKFSMKM |
| | KMIDSARKQNNFSLAMKLLKELHKESKTRDDWLVSWVQSYCRLSHCRSRSQGCSEQVLTV |
| | LKTVSLLDENNVSSYLSKNILAFRDQNILLGTTYRIIANALSSEPACLAEIEEDKARRIL |
| | ELSGSSSEDSEKVIAGLYQRAFQHLSEAVQAAEEEAQPPSWSCGPAAGVIDAYMTLADFC |
| | DQQLRKEEENASVIDSAELQAYPALVVEKMLKALKLNSNEARLKFPRLLQIIERYPEETL |
| | SLMTKEISSVPCWQFISWISHMVALLDKDQAVAVQHSVEEITDNYPQAIVYPFIISSESY |
| | SFKDTSTGHKNKEFVARIKSKLDQGGVIQDFINALDQLSNPELLFKDWSNDVRAELAKTP |
| | VNKKNIEKMYERMYAALGDPKAPGLGAFRRKFIQTFGKEFDKHFGKGGSKLLRMKLSDFN |
| | DITNMLLLKMNKDSKPPGNLKECSPWMSDFKVEFLRNELEIPGQYDGRGKPLPEYHVRIA |
| | GFDERVTVMASLRRPKRIIIRGHDEREHPFLVKGGEDLRQDQRVEQLFQVMNGILAQDSA |
| | CSQRALQLRTYSVVPMTSSDPRAPPCEYKDWLTKMSGKHDVGAYMLMYKGANRTETVTSF |
| | RKRESKVPADLLKRAFVRMSTSPEAFLALRSHFASSHALICISHWILGIGDRHLNNFMVA |
| | METGGVIGIDFGHAFGSATQFLPVPELMPFRLTRQFINLMLPMKETGLMYSIMVHALRAF |
| | RSDPGLLTNTMDVFVKEPSFDWKNFEQKMLKKGGSWIQEINVAEKNWYPRQKICYAKRKL |
| | AGANPAVITCDELLLGHEKAPAFRDYVAVARGSKDHNIRAQEPESGLSEETQVKCLMDQA |
| | TDPNILGRTWEGWEPWM |
| 53BP1 | >sp\|Q12888\|TP53B_HUMAN Tumor suppressor p53-binding protein 1 |
| | OS = Homo sapiens GN = TP53BP1 PE = 1 SV = 2 (SEQ ID NO: 283) |
| | MDPTGSQLDSDFSQQDTPCLIIEDSQPESQVLEDDSGSHFSMLSRHLPNLQTHKENPVLD |
| | VVSNPEQTAGEERGDGNSGFNEHLKENKVADPVDSSNLDTCGSISQVIEQLPQPNRTSSV |
| | LGMSVESAPAVEEEKGEELEQKEKEKEEDTSGNTTHSLGAEDTASSQLGFGVLELSQSQD |
| | VEENTVPYEVDKEQLQSVTTNSGYTRLSDVDANTAIKHEEQSNEDIPIAEQSSKDIPVTA |
| | QPSKDVHVVKEQNPPPARSEDMPFSPKASVAAMEAKEQLSAQELMESGLQIQKSPEPEVL |
| | STQEDLFDQSNKTVSSDGCSTPSREEGGCSLASTPATTLHLLQLSGQRSLVQDSLSTNSS |
| | DLVAPSPDAFRSTPFIVPSSPTEQEGRQDKPMDTSVLSEEGGEPFQKKLQSGEPVELENP |
| | PLLPESTVSPQASTPISQSTPVFPPGSLPIPSQPQFSHDIFIPSPSLEEQSNDGKKDGDM |
| | HSSSLTVECSKTSEIEPKNSPEDLGLSLTGDSCKLMLSTSEYSQSPKMESLSSHRIDEDG |
| | ENTQIEDTEPMSPVLNSKFVPAENDSILMNPAQDGEVQLSQNDDKTKGDDTDTRDDISIL |
| | ATGCKGREETVAEDVCIDLTCDSGSQAVPSPATRSEALSSVLDQEEAMEIKEHHPEEGSS |
| | GSEVEEIPETPCESQGEELKEENMESVPLHLSLTETQSQGLCLQKEMPKKECSEAMEVET |
| | SVISIDSPQKLAILDQELEHKEQEAWEEATSEDSSVVIVDVKEPSPRVDVSCEPLEGVEK |
| | CSDSQSWEDIAPEIEPCAENRLDTKEEKSVEYEGDLKSGTAETEPVEQDSSQPSLPLVRA |
| | DDPLRLDQELQQPQTQEKTSNSLTEDSKMANAKQLSSDAEAQKLGKPSAHASQSFCESSS |
| | ETPFHFTLPKEGDIIPPLTGATPPLIGHLKLEPKRHSTPIGISNYPESTIATSDVMSESM |
| | VETHDPILGSGKGDSGAAPDVDDKLCLRMKLVSPETEASEESLQFNLEKPATGERKNGST |
| | AVAESVASPQKTMSVLSCICEARQENEARSEDPPTTPIRGNLLHFPSSQGEEEKEKLEGD |
| | HTIRQSQQPMKPISPVKDPVSPASQKMVIQGPSSPQGEAMVTDVLEDQKEGRSTNKENPS |
| | KALIERPSQNNIGIQTMECSLRVPETVSAATQTIKNVCEQGTSTVDQNFGKQDATVQTER |
| | GSGEKPVSAPGDDTESLHSQGEEEFDMPQPPHGHVLHRHMRTIREVRTLVTRVITDVYYV |
| | DGTEVERKVTEETEEPIVECQECETEVSPSQTGGSSGDLGDISSFSSKASSLHRTSSGTS |
| | LSAMHSSGSSGKGAGPLRGKTSGTEPADFALPSSRGGPGKLSPRKGVSQTGTPVCEEDGD |
| | AGLGIRQGGKAPVTPRGRGRRGRPPSRTTGTRETAVPGPLGIEDISPNLSPDDKSFSRVV |
| | PRVPDSTRRTDVGAGALRRSDSPEIPFQAAAGPSDGLDASSPGNSFVGLRVVAKWSSNGY |
| | FYSGKITRDVGAGKYKLLFDDGYECDVLGKDILLCDPIPLDTEVTALSEDEYFSAGVVKG |
| | HRKESGELYYSIEKEGQRKWYKRMAVILSLEQGNRLREQYGLGPYEAVTPLTKAADISLD |
| | NLVEGKRKRRSNVSSPATPTASSSSSTTPTRKITESPRASMGVLSGKRKLITSEEERSPA |
| | KRGRKSATVKPGAVGAGEFVSPCESGDNTGEPSALEEQRGPLPLNKTLFLGYAFLLTMAT |
| | TSDKLASRSKLPDGPTGSSEEEEEFLEIPPFNKQYTESQLRAGAGYILEDFNEAQCNTAY |
| | QCLLIADQHCRTRKYFLCLASGIPCVSHVWVHDSCHANQLQNYRNYLLPAGYSLEEQRIL |
| | DWQPRENPFQNLKVLLVSDQQQNFLELWSEILMTGGAASVKQHHSSAHNKDIALGVFDVV |
| | VTDPSCPASVLKCAEALQLPVVSQEWVIQCLIVGERIGFKQHPKYKHDYVSH |
| | >sp\|Q12888-2\|TP53B_HUMAN Isoform 2 of Tumor suppressor p53- |
| | binding protein 1 OS = Homo sapiens GN = TP53BP1 (SEQ ID |
| | NO: 284) |
| | MPGEQMDPTGSQLDSDFSQQDTPCLIIEDSQPESQVLEDDSGSHFSMLSRHLPNLQTHKE |
| | NPVLDVVSNPEQTAGEERGDGNSGFNEHLKENKVADPVDSSNLDTCGSISQVIEQLPQPN |
| | RTSSVLGMSVESAPAVEEEKGEELEQKEKEKEEDTSGNTTHSLGAEDTASSQLGFGVLEL |
| | SQSQDVEENTVPYEVDKEQLQSVTTNSGYTRLSDVDANTAIKHEEQSNEDIPIAEQSSKD |
| | IPVTAQPSKDVHVVKEQNPPPARSEDMPFSPKASVAAMEAKEQLSAQELMESGLQIQKSP |
| | EPEVLSTQEDLFDQSNKTVSSDGCSTPSREEGGCSLASTPATTLHLLQLSGQRSLVQDSL |
| | STNSSDLVAPSPDAFRSTPFIVPSSPTEQEGRQDKPMDTSVLSEEGGEPFQKKLQSGEPV |
| | ELENPPLLPESTVSPQASTPISQSTPVFPPGSLPIPSQPQFSHDIFIPSPSLEEQSNDGK |
| | KDGDMHSSSLTVECSKTSEIEPKNSPEDLGLSLTGDSCKLMLSTSEYSQSPKMESLSSHR |
| | IDEDGENTQIEDTEPMSPVLNSKFVPAENDSILMNPAQDGEVQLSQNDDKTKGDDTDTRD |
| | DISILATGCKGREETVAEDVCIDLTCDSGSQAVPSPATRSEALSSVLDQEEAMEIKEHHP |
| | EEGSSGSEVEEIPETPCESQGEELKEENMESVPLHLSLTETQSQGLCLQKEMPKKECSEA |
| | MEVETSVISIDSPQKLAILDQELEHKEQEAWEEATSEDSSVVIVDVKEPSPRVDVSCEPL |
| | EGVEKCSDSQSWEDIAPEIEPCAENRLDTKEEKSVEYEGDLKSGTAETEPVEQDSSQPSL |
| | PLVRADDPLRLDQELQQPQTQEKTSNSLTEDSKMANAKQLSSDAEAQKLGKPSAHASQSF |
| | CESSSETPFHFTLPKEGDIIPPLTGATPPLIGHLKLEPKRHSTPIGISNYPESTIATSDV |
| | MSESMVETHDPILGSGKGDSGAAPDVDDKLCLRMKLVSPETEASEESLQFNLEKPATGER |
| | KNGSTAVAESVASPQKTMSVLSCICEARQENEARSEDPPTTPIRGNLLHFPSSQGEEEKE |
| | KLEGDHTIRQSQQPMKPISPVKDPVSPASQKMVIQGPSSPQGEAMVTDVLEDQKEGRSTN |
| | KENPSKALIERPSQNNIGIQTMECSLRVPETVSAATQTIKNVCEQGTSTVDQNFGKQDAT |
| | VQTERGSGEKPVSAPGDDTESLHSQGEEEFDMPQPPHGHVLHRHMRTIREVRTLVTRVIT |
| | DVYYVDGTEVERKVTEETEEPIVECQECETEVSPSQTGGSSGDLGDISSFSSKASSLHRT |
| | SSGTSLSAMHSSGSSGKGAGPLRGKTSGTEPADFALPSSRGGPGKLSPRKGVSQTGTPVC |
| | EEDGDAGLGIRQGGKAPVTPRGRGRRGRPPSRTTGTRETAVPGPLGIEDISPNLSPDDKS |
| | FSRVVPRVPDSTRRTDVGAGALRRSDSPEIPFQAAAGPSDGLDASSPGNSFVGLRVVAKW |
| | SSNGYFYSGKITRDVGAGKYKLLFDDGYECDVLGKDILLCDPIPLDTEVTALSEDEYFSA |
| | GVVKGHRKESGELYYSIEKEGQRKWYKRMAVILSLEQGNRLREQYGLGPYEAVTPLTKAA |
| | DISLDNLVEGKRKRRSNVSSPATPTASSSSSTTPTRKITESPRASMGVLSGKRKLITSEE |
| | ERSPAKRGRKSATVKPGAVGAGEFVSPCESGDNTGEPSALEEQRGPLPLNKTLFLGYAFL |
| | LTMATTSDKLASRSKLPDGPTGSSEEEEEFLEIPPFNKQYTESQLRAGAGYILEDFNEAQ |
| | CNTAYQCLLIADQHCRTRKYFLCLASGIPCVSHVWVHDSCHANQLQNYRNYLLPAGYSLE |
| | EQRILDWQPRENPFQNLKVLLVSDQQQNFLELWSEILMTGGAASVKQHHSSAHNKDIALG |
| | VFDVVVTDPSCPASVLKCAEALQLPVVSQEWVIQCLIVGERIGFKQHPKYKHDYVSH |
| | >sp\|Q12888-3\|TP53B_HUMAN Isoform 3 of Tumor suppressor p53- |
| | binding protein 1 OS = Homo sapiens GN = TP53BP1 (SEQ ID |
| | NO: 285) |
| | MPGEQMDPTGSQLDSDFSQQDTPCLIIEDSQPESQVLEDDSGSHFSMLSRHLPNLQTHKE |
| | NPVLDVVSNPEQTAGEERGDGNSGFNEHLKENKVADPVDSSNLDTCGSISQVIEQLPQPN |
| | RTSSVLGMSVESAPAVEEEKGEELEQKEKEKEEDTSGNTTHSLGAEDTASSQLGFGVLEL |
| | SQSQDVEENTVPYEVDKEQLQSVTTNSGYTRLSDVDANTAIKHEEQSNEDIPIAEQSSKD |
| | IPVTAQPSKDVHVVKEQNPPPARSEDMPFSPKASVAAMEAKEQLSAQELMESGLQIQKSP |
| | EPEVLSTQEDLFDQSNKTVSSDGCSTPSREEGGCSLASTPATTLHLLQLSGQRSLVQDSL |
| | STNSSDLVAPSPDAFRSTPFIVPSSPTEQEGRQDKPMDTSVLSEEGGEPFQKKLQSGEPV |
| | ELENPPLLPESTVSPQASTPISQSTPVFPPGSLPIPSQPQFSHDIFIPSPSLEEQSNDGK |
| | KDGDMHSSSLTVECSKTSEIEPKNSPEDLGLSLTGDSCKLMLSTSEYSQSPKMESLSSHR |
| | IDEDGENTQIEDTEPMSPVLNSKFVPAENDSILMNPAQDGEVQLSQNDDKTKGDDTDTRD |
| | DISILATGCKGREETVAEDVCIDLTCDSGSQAVPSPATRSEALSSVLDQEEAMEIKEHHP |
| | EEGSSGSEVEEIPETPCESQGEELKEENMESVPLHLSLTETQSQGLCLQKEMPKKECSEA |
| | MEVETSVISIDSPQKLAILDQELEHKEQEAWEEATSEDSSVVIVDVKEPSPRVDVSCEPL |
| | EGVEKCSDSQSWEDIAPEIEPCAENRLDTKEEKSVEYEGDLKSGTAETEPVEQDSSQPSL |
| | PLVRADDPLRLDQELQQPQTQEKTSNSLTEDSKMANAKQLSSDAEAQKLGKPSAHASQSF |
| | CESSSETPFHFTLPKEGDIIPPLTGATPPLIGHLKLEPKRHSTPIGISNYPESTIATSDV |
| | MSESMVETHDPILGSGKGDSGAAPDVDDKLCLRMKLVSPETEASEESLQFNLEKPATGER |
| | KNGSTAVAESVASPQKTMSVLSCICEARQENEARSEDPPTTPIRGNLLHFPSSQGEEEKE |
| | KLEGDHTIRQSQQPMKPISPVKDPVSPASQKMVIQGPSSPQGEAMVTDVLEDQKEGRSTN |
| | KENPSKALIERPSQNNIGIQTMECSLRVPETVSAATQTIKNVCEQGTSTVDQNFGKQDAT |
| | VQTERGSGEKPVSAPGDDTESLHSQGEEEFDMPQPPHGHVLHRHMRTIREVRTLVTRVIT |
| | DVYYVDGTEVERKVTEETEEPIVECQECETEVSPSQTGGSSGDLGDISSFSSKASSLHRT |
| | SSGTSLSAMHSSGSSGKGAGPLRGKTSGTEPADFALPSSRGGPGKLSPRKGVSQTGTPVC |
| | EEDGDAGLGIRQGGKAPVTPRGRGRRGRPPSRTTGTRETAVPGPLGIEDISPNLSPDDKS |
| | FSRVVPRVPDSTRRTDVGAGALRRSDSPEIPFQAAAGPSDGLDASSPGNSFVGLRVVAKW |
| | SSNGYFYSGKITRDVGAGKYKLLFDDGYECDVLGKDILLCDPIPLDTEVTALSEDEYFSA |
| | GVVKGHRKESGELYYSIEKEGQRKWYKRMAVILSLEQGNRLREQYGLGPYEAVTPLTKAA |
| | DISLDNLVEGKRKRRSNVSSPATPTASSSSSTTPTRKITESPRASMGVLSGKRKLITSEE |
| | ERSPAKRGRKSATVKPVGAGEFVSPCESGDNTGEPSALEEQRGPLPLNKTLFLGYAFLLT |
| | MATTSDKLASRSKLPDGPTGSSEEEEEFLEIPPFNKQYTESQLRAGAGYILEDFNEAQCN |
| | TAYQCLLIADQHCRTRKYFLCLASGIPCVSHVWVHDSCHANQLQNYRNYLLPAGYSLEEQ |
| | RILDWQPRENPFQNLKVLLVSDQQQNFLELWSEILMTGGAASVKQHHSSAHNKDIALGVF |
| | DVVVTDPSCPASVLKCAEALQLPVVSQEWVIQCLIVGERIGFKQHPKYKHDYVSH |
| XRCC4 | >sp\|Q13426\|XRCC4_HUMAN DNA repair protein XRCC4 |
| | OS = Homo sapiens GN = XRCC4 PE = 1 SV = 2 (SEQ ID NO: 286) |
| | MERKISRIHLVSEPSITHFLQVSWEKTLESGFVITLTDGHSAWTGTVSESEISQEADDMA |
| | MEKGKYVGELRKALLSGAGPADVYTFNFSKESCYFFFEKNLKDVSFRLGSFNLEKVENPA |
| | EVIRELICYCLDTIAENQAKNEHLQKENERLLRDWNDVQGRFEKCVSAKEALETDLYKRF |
| | ILVLNEKKTKIRSLHNKLLNAAQEREKDIKQEGETAICSEMTADRDPVYDESTDEESENQ |
| | TDLSGLASAAVSKDDSIISSLDVTDIAPSRKRRQRMQRNLGTEPKMAPQENQLQEKENSR |
| | PDSSLPETSKKEHISAENMSLETLRNSSPEDLFDEI |
| | >sp\|Q13426-2\|XRCC4_HUMAN Isoform 2 of DNA repair protein XRCC4 |
| | OS = Homo sapiens GN = XRCC4 (SEQ ID NO: 287) |
| | MERKISRIHLVSEPSITHFLQVSWEKTLESGFVITLTDGHSAWTGTVSESEISQEADDMA |
| | MEKGKYVGELRKALLSGAGPADVYTFNFSKESCYFFFEKNLKDVSFRLGSFNLEKVENPA |
| | EVIRELICYCLDTIAENQAKNEHLQKENERLLRDWNDVQGRFEKCVSAKEALETDLYKRF |
| | ILVLNEKKTKIRSLHNKLLNAAQEREKDIKQEGETAICSEMTADRDPVYDESTDEESENQ |
| | TDLSGLASAAVSKDDSIISSLDVTDIAPSRKRRQRMQRNLGTEPKMAPQENQLQEKEKPD |
| | SSLPETSKKEHISAENMSLETLRNSSPEDLFDEI |
| | >sp\|Q13426-3\|XRCC4_HUMAN Isoform 3 of DNA repair protein XRCC4 |
| | OS = Homo sapiens GN = XRCC4 (SEQ ID NO: 288) |
| | MERKISRIHLVSEPSITHFLQVSWEKTLESGFVITLTDGHSAWTGTVSESEISQEADDMA |
| | MEKGKYVGELRKALLSGAGPADVYTFNFSKESCYFFFEKNLKDVSFRLGSFNLEKVENPA |
| | EVIRELICYCLDTIAENQAKNEHLQKENERLLRDWNDVQGRFEKCVSAKEALETDLYKRF |
| | ILVLNEKKTKIRSLHNKLLNAAQEREKDIKQEGETAICSEMTADRDPVYDESTDEESENQ |
| | TDLSGLASAAVSKDDSIISSLDVTDIAPSRKRRQRMQRNLGTEPKMAPQENQLQEKEKGR |
| | KKETSEKEAV |
| LIG4 | >sp\|P49917\|DNLI4_HUMAN DNA ligase 4 OS = Homo sapiens |
| | GN = LIG4 PE = 1 SV = 2 (SEQ ID NO: 289) |
| | MAASQTSQTVASHVPFADLCSTLERIQKSKGRAEKIRHFREFLDSWRKFHDALHKNHKDV |
| | TDSFYPAMRLILPQLERERMAYGIKETMLAKLYIELLNLPRDGKDALKLLNYRIPTGTHG |
| | DAGDFAMIAYFVLKPRCLQKGSLTIQQVNDLLDSIASNNSAKRKDLIKKSLLQLITQSSA |
| | LEQKWLIRMIIKDLKLGVSQQTIFSVFHNDAAELHNVTTDLEKVCRQLHDPSVGLSDISI |
| | TLFSAFKPMLAAIADIEHIEKDMKHQSFYIETKLDGERMQMHKDGDVYKYFSRNGYNYTD |
| | QFGASPTEGSLIPFIHNAFKADIQICILDGEMMAYNPNIQTFMQKGTKFDIKRMVEDSDL |
| | QTCYCVFDVLMVNNKKLGHETLRKRYEILSSIFTPIPGRIEIVQKTQAHTKNEVIDALNE |
| | AIDKREEGIMVKQPLSIYKPDKRGEGWLKIKPEYVSGLMDELDILIVGGYWGKGSRGGMM |
| | SHFLCAVAEKPPPGEKPSVFHTLSRVGSGCTMKELYDLGLKLAKYWKPFHRKAPPSSILC |
| | GTEKPEVYIEPCNSVIVQIKAAEIVPSDMYKTGCTLRFPRIEKIRDDKEWHECMTLDDLE |
| | QLRGKASGKLASKHLYIGGDDEPQEKKRKAAPKMKKVIGIIEHLKAPNLTNVNKISNIFE |
| | DVEFCVMSGTDSQPKPDLENRIAEFGGYIVQNPGPDTYCVIAGSENIRVKNIILSNKHDV |
| | VKPAWLLECFKTKSFVPWQPRFMIHMCPSTKEHFAREYDCYGDSYFIDTDLNQLKEVFSG |
| | IKNSNEQTPEEMASLIADLEYRYSWDCSPLSMFRRHTVYLDSYAVINDLSTKNEGTRLAI |
| | KALELRFHGAKVVSCLAEGVSHVIIGEDHSRVADFKAFRRTFKRKFKILKESWVTDSIDK |
| | CELQEENQYLI |
| XLF (also | >sp\|Q9H9Q4\|NHEJ1_HUMAN Non-homologous end-joining factor 1 |
| called NHEJ1) | OS = Homo sapiens GN = NHEJ1 PE = 1 SV = 1 (SEQ ID NO: 290) |
| | MEELEQGLLMQPWAWLQLAENSLLAKVFITKQGYALLVSDLQQVWHEQVDTSVVSQRAKE |
| | LNKRLTAPPAAFLCHLDNLLRPLLKDAAHPSEATFSCDCVADALILRVRSELSGLPFYWN |
| | FHCMLASPSLVSQHLIRPLMGMSLALQCQVRELATLLHMKDLEIQDYQESGATLIRDRLK |
| | TEPFEENSFLEQFMIEKLPEACSIGDGKPFVMNLQDLYMAVTTQEVQVGQKHQGAGDPHT |
| | SNSASLQGIDSQCVNQPEQLVSSAPTLSAPEKESTGTSGPLQRPQLSKVKRKKPRGLFS |
| | >sp\|Q9H9Q4-2\|NHEJ1_HUMAN Isoform 2 of Non-homologous end-joining |
| | factor 1 OS = Homo sapiens GN = NHEJ1 (SEQ ID NO: 291) |
| | MEELEQGLLMQPWAWLQLAENSLLAKVFITKQGYALLVSDLQQVWHEQVDTSVVSQRAKE |
| | LNKRLTAPPAAFLCHLDNLLRPLLKDAAHPSEATFSCDCVADALILRVRSELSGLPFYWN |
| | FHCMLASPSLVSQHLIRPLMGMSLALQCQVRELATLLHMKDLEIQDYQESGATLIRDRLK |
| | TEPFEENSFLEQFMIEKLPEACSIGDGKPFVMNLQDLYMAVTTQEVQVGQKHQGAGDPHT |
| | SNSASLQGIDSQCVNQPEQLVSSAPTLSAPEKESTALCRDLSCQRSRGRSQGVSSVNLLW |
| | PQLLRMDLENSFQASP |
| ARTEMIS | MSSFEGQMAEYPTISIDRFDRENLRARAYFLSHCHKDHMKGLRAPTLKRRLECSLKVYLY |
| | CSPVTKELLLTSPKYRFWKKRIISIEIETPTQISLVDEASGEKEEIVVTLLPAGHCPGSV |
| | MFLFQGNNGTVLYTGDFRLAQGEAARMELLHSGGRVKDIQSVYLDTTFCDPRFYQIPSRE |
| | ECLSGVLELVRSWITRSPYHVVWLNCKAAYGYEYLFTNLSEELGVQVHVNKLDMFRNMPE |
| | ILHHLTTDRNTQIHACRHPKAEEYFQWSKLPCGITSRNRIPLHIISIKPSTMWFGERSRK |
| | TNVIVRTGESSYRACFSFHSSYSEIKDFLSYLCPVNAYPNVIPVGTTMDKVVEILKPLCR |
| | SSQSTEPKYKPLGKLKRARTVHRDSEEEDDYLFDDPLPIPLRHKVPYPETFHPEVFSMTA |
| | VSEKQPEKLRQTPGCCRAECMQSSRFTNFVDCEESNSESEEEVGIPASLQGDLGSVLHLQ |
| | KADGDVPQWEVFFKRNDEITDESLENFPSSTVAGGSQSPKLFSDSDGESTHISSQNSSQS |
| | THITEQGSQGWDSQSDTVLLSSQERNSGDITSLDKADYRPTIKENIPASLMEQNVICPKD |
| | TYSDLKSRDKDVTIVPSTGEPTTLSSETHIPEEKSLLNLSTNADSQSSSDFEVPSTPEAE |
| | LPKREHLQYLYEKLATGESIAVKKRKCSLLDT (Artemis Isoform 1 CCDS 31149.1) |
| | (SEQ ID NO: 292) |
| | MKHQERFLFQGNNGTVLYTGDFRLAQGEAARMELLHSGGRVKDIQSVYLDTTFCDPRFYQ |
| | IPSREECLSGVLELVRSWITRSPYHVVWLNCKAAYGYEYLFTNLSEELGVQVHVNKLDMF |
| | RNMPEILHHLTTDRNTQIHACRHPKAEEYFQWSKLPCGITSRNRIPLHIISIKPSTMWFG |
| | ERSRKTNVIVRTGESSYRACFSFHSSYSEIKDFLSYLCPVNAYPNVIPVGTTMDKVVEIL |
| | KPLCRSSQSTEPKYKPLGKLKRARTVHRDSEEEDDYLFDDPLPIPLRHKVPYPETFHPEV |
| | FSMTAVSEKQPEKLRQTPGCCRAECMQSSRFTNFVDCEESNSESEEEVGIPASLQGDLGS |
| | VLHLQKADGDVPQWEVFFKRNDEITDESLENFPSSTVAGGSQSPKLFSDSDGESTHISSQ |
| | NSSQSTHITEQGSQGWDSQSDTVLLSSQERNSGDITSLDKADYRPTIKENIPASLMEQNV |
| | ICPKDTYSDLKSRDKDVTIVPSTGEPTTLSSETHIPEEKSLLNLSTNADSQSSSDFEVPS |
| | TPEAELPKREHLQYLYEKLATGESIAVKKRKCSLLDT (Artemis Isoform 2 CCDS |
| | 7105.1) (SEQ ID NO: 293) |
| | MFLFQGNNGTVLYTGDFRLAQGEAARMELLHSGGRVKDIQSVYLDTTFCDPRFYQIPSRE |
| | ECLSGVLELVRSWITRSPYHVVWLNCKAAYGYEYLFTNLSEELGVQVHVNKLDMFRNMPE |
| | ILHHLTTDRNTQIHACRHPKAEEYFQWSKLPCGITSRNRIPLHIISIKPSTMWFGERSRK |
| | TNVIVRTGESSYRACFSFHSSYSEIKDFLSYLCPVNAYPNVIPVGTTMDKVVEILKPLCR |
| | SSQSTEPKYKPLGKLKRARTVHRDSEEEDDYLFDDPLPIPLRHKVPYPETFHPEVFSMTA |
| | VSEKQPEKLRQTPGCCRAECMQSSRFTNFVDCEESNSESEEEVGIPASLQGDLGSVLHLQ |
| | KADGDVPQWEVFFKRNDEITDESLENFPSSTVAGGSQSPKLFSDSDGESTHISSQNSSQS |
| | THITEQGSQGWDSQSDTVLLSSQERNSGDITSLDKADYRPTIKENIPASLMEQNVICPKD |
| | TYSDLKSRDKDVTIVPSTGEPTTLSSETHIPEEKSLLNLSTNADSQSSSDFEVPSTPEAE |
| | LPKREHLQYLYEKLATGESIAVKKRKCSLLDT (Artemis Isoform 3 CCDS 31150.1) |
| | (SEQ ID NO: 294) |
| APLF | >sp\|Q8IW19\|APLF_HUMAN Aprataxin and PNK-like factor OS = Homo |
| | sapiens GN = APLF PE = 1 SV = 1 (SEQ ID NO: 295) |
| | MSGGFELQPRDGGPRVALAPGETVIGRGPLLGITDKRVSRRHAILEVAGGQLRIKPIHTN |
| | PCFYQSSEKSQLLPLKPNLWCYLNPGDSFSLLVDKYIFRILSIPSEVEMQCTLRNSQVLD |
| | EDNILNETPKSPVINLPHETTGASQLEGSTEIAKTQMTPTNSVSFLGENRDCNKQQPILA |
| | ERKRILPTWMLAEHLSDQNLSVPAISGGNVIQGSGKEEICKDKSQLNTTQQGRRQLISSG |
| | SSENTSAEQDTGEECKNTDQEESTISSKEMPQSFSAITLSNTEMNNIKTNAQRNKLPIEE |
| | LGKVSKHKIATKRIPHKEDEAMSCSENCSSAQGDSLQDESQGSHSESSSNPSNPETLHAK |
| | ATDSVLQGSEGNKVKRTSCMYGANCYRKNPVHFQHFSHPGDSDYGGVQIVGQDETDDRPE |
| | CPYGPSCYRKNPQHKIEYRHNTLPVRNVLDEDNDNVGQPNEYDLNDSFLDDEEEDYEPTD |
| | EDSDWEPGKEDEEKEDVEELLKEAKRFMKRK |
| PNK (also | >sp\|Q96T60\|PNKP_HUMAN Bifunctional polynucleotide |
| called PNKP) | phosphatase/kinase OS = Homo sapiens GN = PNKP PE = 1 SV = 1 |
| | (SEQ ID NO: 296) |
| | MGEVEAPGRLWLESPPGGAPPIFLPSDGQALVLGRGPLTQVTDRKCSRTQVELVADPETR |
| | TVAVKQLGVNPSTTGTQELKPGLEGSLGVGDTLYLVNGLHPLTLRWEETRTPESQPDTPP |
| | GTPLVSQDEKRDAELPKKRMRKSNPGWENLEKLLVFTAAGVKPQGKVAGFDLDGTLITTR |
| | SGKVFPTGPSDWRILYPEIPRKLRELEAEGYKLVIFTNQMSIGRGKLPAEEFKAKVEAVV |
| | EKLGVPFQVLVATHAGLYRKPVTGMWDHLQEQANDGTPISIGDSIFVGDAAGRPANWAPG |
| | RKKKDFSCADRLFALNLGLPFATPEEFFLKWPAAGFELPAFDPRTVSRSGPLCLPESRAL |
| | LSASPEVVVAVGFPGAGKSTFLKKHLVSAGYVHVNRDTLGSWQRCVTTCETALKQGKRVA |
| | IDNTNPDAASRARYVQCARAAGVPCRCFLFTATLEQARHNNRFREMTDSSHIPVSDMVMY |
| | GYRKQFEAPTLAEGFSAILEIPFRLWVEPRLGRLYCQFSEG |
| | >sp\|Q96T60-2\|PNKP_HUMAN Isoform 2 of Bifunctional polynucleotide |
| | phosphatase/kinase OS = Homo sapiens GN = PNKP (SEQ ID NO: 297) |
| | MQILTPPLQSSVELVADPETRTVAVKQLGVNPSTTGTQELKPGLEGSLGVGDTLYLVNGL |
| | HPLTLRWEETRTPESQPDTPPGTPLVSQDEKRDAELPKKRMRKSNPGWENLEKLLVFTAA |
| | GVKPQGKVAGFDLDGTLITTRSGKVFPTGPSDWRILYPEIPRKLRELEAEGYKLVIFTNQ |
| | MSIGRGKLPAEEFKAKVEAVVEKLGVPFQVLVATHAGLYRKPVTGMWDHLQEQANDGTPI |
| | SIGDSIFVGDAAGRPANWAPGRKKKDFSCADRLFALNLGLPFATPEEFFLKWPAAGFELP |
| | AFDPRIVSRSGPLCLPESRALLSASPEVVVAVGFPGAGKSTFLKKHLVSAGYVHVNRDIL |
| | GSWQRCVTTCETALKQGKRVAIDNTNPDAASRARYVQCARAAGVPCRCFLFTATLEQARH |
| | NNRFREMIDSSHIPVSDMVMYGYRKQFEAPTLAEGFSAILEIPFRLWVEPRLGRLYCQFS |
| | EG |
| Rif1 | >sp\|Q5UIP0\|RIF1_HUMAN Telomere-associated protein RIF1 OS = Homo |
| | sapiens GN = RIF1 PE = 1 SV = 2 (SEQ ID NO: 298) |
| | MTARGQSPLAPLLETLEDPSASHGGQTDAYLTLTSRMTGEEGKEVITEIEKKLPRLYKVL |
| | KTHISSQNSELSSAALQALGFCLYNPKITSELSEANALELLSKLNDTIKNSDKNVRTRAL |
| | WVISKQTFPSEVVGKMVSSIIDSLEILFNKGETHSAVVDFEALNVIVRLIEQAPIQMGEE |
| | AVRWAKLVIPLVVHSAQKVHLRGATALEMGMPLLLQKQQEIASITEQLMTTKLISELQKL |
| | FMSKNETYVLKLWPLFVKLLGRTLHRSGSFINSLLQLEELGFRSGAPMIKKIAFIAWKSL |
| | IDNFALNPDILCSAKRLKLLMQPLSSIHVRTETLALTKLEVWWYLLMRLGPHLPANFEQV |
| | CVPLIQSTISIDSNASPQGNSCHVATSPGLNPMTPVHKGASSPYGAPGTPRMNLSSNLGG |
| | MATIPSIQLLGLEMLLHFLLGPEALSFAKQNKLVLSLEPLEHPLISSPSFFSKHANTLIT |
| | AVHDSFVAVGKDAPDVVVSAIWKELISLVKSVTESGNKKEKPGSEVLTLLLKSLESIVKS |
| | EVFPVSKTLVLMEITIKGLPQKVLGSPAYQVANMDILNGTPALFLIQLIFNNFLECGVSD |
| | ERFFLSLESLVGCVLSGPTSPLAFSDSVLNVINQNAKQLENKEHLWKMWSVIVTPLTELI |
| | NQTNEVNQGDALEHNFSAIYGALTLPVNHIFSEQRFPVATMKTLLRTWSELYRAFARCAA |
| | LVATAEENLCCEELSSKIMSSLEDEGFSNLLFVDRIIYIITVMVDCIDFSPYNIKYQPKV |
| | KSPQRPSDWSKKKNEPLGKLTSLFKLIVKVIYSFHTLSFKEAHSDTLFTIGNSITGIISS |
| | VLGHISLPSMIRKIFATLTRPLALFYENSKLDEVPKVYSCLNNKLEKLLGETIACLQFSY |
| | TGTYDSELLEQLSPLLCIIFLHKNKQIRKQSAQFWNATFAKVMMLVYPEELKPVLTQAKQ |
| | KFLLLLPGLETVEMMEESSGPYSDGTENSQLNVKISGMERKSNGKRDSFLAQTKNKKENM |
| | KPAAKLKLESSSLKVKGEILLEEEKSTDFVFIPPEGKDAKERILTDHQKEVLKTKRCDIP |
| | AMYNNLDVSQDTLFTQYSQEEPMEIPTLTRKPKEDSKMMITEEQMDSDIVIPQDVTEDCG |
| | MAEHLEKSSLSNNECGSLDKISPEMSNSNNDERKKALISSRKTSTECASSTENSFVVSSS |
| | SVSNTTVAGTPPYPTSRRQTFITLEKFDGSENRPFSPSPLNNISSTVTVKNNQETMIKTD |
| | FLPKAKQREGTFSKSDSEKIVNGTKRSSRRAGKAEQTGNKRSKPLMRSEPEKNTEESVEG |
| | IVVLENNPPGLLNQTECVSDNQVHLSESTMEHDNTKLKAATVENAVLLETNTVEEKNVEI |
| | NLESKENTPPVVISADQMVNEDSQVQIIPNQKTLRRSSRRRSEVVESTTESQDKENSHQK |
| | KERRKEEEKPLQKSPLHIKDDVLPKQKLIAEQTLQENLIEKGSNLHEKTLGETSANAETE |
| | QNKKKADPENIKSEGDGTQDIVDKSSEKLVRGRTRYQTRRASQGLLSSIENSESDSSEAK |
| | EEGSRKKRSGKWKNKSNESVDIQDQEEKVVKQECIKAENQSHDYKATSEEDVSIKSPICE |
| | KQDESNTVICQDSTVTSDLLQVPDDLPNVCEEKNETSKYAEYSFTSLPVPESNLRTRNAI |
| | KRLHKRDSFDNCSLGESSKIGISDISSLSEKTFQTLECQHKRSRRVRRSKGCDCCGEKSQ |
| | PQEKSLIGLKNTENNDVEISETKKADVQAPVSPSETSQANPYSEGQFLDEHHSVNFHLGL |
| | KEDNDTINDSLIVSETKSKENTMQESLPSGIVNFREEICDMDSSEAMSLESQESPNENFK |
| | TVGPCLGDSKNVSQESLETKEEKPEETPKMELSLENVTVEGNACKVTESNLEKAKTMELN |
| | VGNEASFHGQERTKTGISEEAAIEENKRNDDSEADTAKLNAKEVATEEFNSDISLSDNTT |
| | PVKLNAQTEISEQTAAGELDGGNDVSDLHSSEETNIKMKNNEEMMIGEAMAEIGHDGETE |
| | NEGITTKTSKPDEAETNMLTAEMDNFVCDTVEMSTEEGIIDANKTETNTEYSKSEEKLDN |
| | NQMVMESDILQEDHHTSQKVEEPSQCLASGTAISELIIEDNNASPQKLRELDPSLVSAND |
| | SPSGMQTRCVWSPLASPSTSILKRGLKRSQEDEISSPVNKVRRVSFADPIYQAGLADDID |
| | RRCSIVRSHSSNSSPIGKSVKISPITQSKHNITSAKGFLSPGSRSPKFKSSKKCLISEMA |
| | KESIPCPTESVYPPLVNCVAPVDIILPQITSNMWARGLGQLIRAKNIKTIGDLSTLTASE |
| | IKTLPIRSPKVSNVKKALRIYHEQQVKTRGLEEIPVFDISEKTVNGIENKSLSPDEERLV |
| | SDIIDPVALEIPLSKNLLAQISALALQLDSEDLHNYSGSQLFEMHEKLSCMANSVIKNLQ |
| | SRWRSPSHENSI |
| | >sp\|Q5UIP0-2\|RIF1_HUMAN Isoform 2 of Telomere-associated protein |
| | RIF1 OS = Homo sapiens GN = RIF1 (SEQ ID NO: 299) |
| | MTARGQSPLAPLLETLEDPSASHGGQTDAYLTLTSRMTGEEGKEVITEIEKKLPRLYKVL |
| | KTHISSQNSELSSAALQALGFCLYNPKITSELSEANALELLSKLNDTIKNSDKNVRTRAL |
| | WVISKQTEPSEVVGKMVSSIIDSLEILFNKGETHSAVVDFEALNVIVRLIEQAPIQMGEE |
| | AVRWAKLVIPLVVHSAQKVHLRGATALEMGMPLLLQKQQEIASITEQLMTTKLISELQKL |
| | FMSKNETYVLKLWPLFVKLLGRTLHRSGSFINSLLQLEELGFRSGAPMIKKIAFIAWKSL |
| | IDNFALNPDILCSAKRLKLLMQPLSSIHVRTETLALTKLEVWWYLLMRLGPHLPANFEQV |
| | CVPLIQSTISIDSNASPQGNSCHVATSPGLNPMTPVHKGASSPYGAPGTPRMNLSSNLGG |
| | MATIPSIQLLGLEMLLHFLLGPEALSFAKQNKLVLSLEPLEHPLISSPSFFSKHANTLIT |
| | AVHDSFVAVGKDAPDVVVSAIWKELISLVKSVTESGNKKEKPGSEVLTLLLKSLESIVKS |
| | EVFPVSKTLVLMEITIKGLPQKVLGSPAYQVANMDILNGTPALFLIQLIFNNFLECGVSD |
| | ERFFLSLESLVGCVLSGPTSPLAFSDSVLNVINQNAKQLENKEHLWKMWSVIVTPLTELI |
| | NQTNEVNQGDALEHNFSAIYGALTLPVNHIFSEQRFPVATMKTLLRTWSELYRAFARCAA |
| | LVATAEENLCCEELSSKIMSSLEDEGFSNLLFVDRIIYIITVMVDCIDFSPYNIKYQPKV |
| | KSPQRPSDWSKKKNEPLGKLTSLFKLIVKVIYSFHTLSFKEAHSDTLFTIGNSITGIISS |
| | VLGHISLPSMIRKIFATLTRPLALFYENSKLDEVPKVYSCLNNKLEKLLGETIACLQFSY |
| | TGTYDSELLEQLSPLLCIIFLHKNKQIRKQSAQFWNATFAKVMMLVYPEELKPVLTQAKQ |
| | KFLLLLPGLETVEMMEESSGPYSDGTENSQLNVKISGMERKSNGKRDSFLAQTKNKKENM |
| | KPAAKLKLESSSLKVKGEILLEEEKSTDFVFIPPEGKDAKERILTDHQKEVLKTKRCDIP |
| | AMYNNLDVSQDTLFTQYSQEEPMEIPTLTRKPKEDSKMMITEEQMDSDIVIPQDVTEDCG |
| | MAEHLEKSSLSNNECGSLDKTSPEMSNSNNDERKKALISSRKTSTECASSTENSFVVSSS |
| | SVSNTTVAGTPPYPTSRRQTFITLEKFDGSENRPFSPSPLNNISSTVTVKNNQETMIKTD |
| | FLPKAKQREGTFSKSDSEKIVNGTKRSSRRAGKAEQTGNKRSKPLMRSEPEKNTEESVEG |
| | IVVLENNPPGLLNQTECVSDNQVHLSESTMEHDNTKLKAATVENAVLLETNTVEEKNVEI |
| | NLESKENTPPVVISADQMVNEDSQVQITPNQKTLRRSSRRRSEVVESTTESQDKENSHQK |
| | KERRKEEEKPLQKSPLHIKDDVLPKQKLIAEQTLQENLIEKGSNLHEKTLGETSANAETE |
| | QNKKKADPENIKSEGDGTQDIVDKSSEKLVRGRTRYQTRRASQGLLSSIENSESDSSEAK |
| | EEGSRKKRSGKWKNKSNESVDIQDQEEKVVKQECIKAENQSHDYKATSEEDVSIKSPICE |
| | KQDESNTVICQDSTVTSDLLQVPDDLPNVCEEKNETSKYAEYSFTSLPVPESNLRTRNAI |
| | KRLHKRDSFDNCSLGESSKIGISDISSLSEKTFQTLECQHKRSRRVRRSKGCDCCGEKSQ |
| | PQEKSLIGLKNTENNDVEISETKKADVQAPVSPSETSQANPYSEGQFLDEHHSVNFHLGL |
| | KEDNDTINDSLIVSETKSKENTMQESLPSGIVNFREEICDMDSSEAMSLESQESPNENFK |
| | TVGPCLGDSKNVSQESLETKEEKPEETPKMELSLENVTVEGNACKVTESNLEKAKTMELN |
| | VGNEASFHGQERTKTGISEEAAIEENKRNDDSEADTAKLNAKEVATEEFNSDISLSDNTT |
| | PVKLNAQTEISEQTAAGELDGGNDVSDLHSSEETNTKMKNNEEMMIGEAMAETGHDGETE |
| | NEGITTKTSKPDEAETNMLTAEMDNFVCDTVEMSTEEGIIDANKTETNTEYSKSEEKLDN |
| | NQMVMESDILQEDHHTSQKVEEPSQCLASGTAISELIIEDNNASPQKLRELDPSLVSAND |
| | SPSGMQTRCVWSPLASPSTSILKRGLKRSQEDEISSPVNKVRRVSFADPIYQAGLADDID |
| | RRCSIVRSHSSNSSPIGKSVKTSPTTQSKISEMAKESIPCPTESVYPPLVNCVAPVDIIL |
| | PQITSNMWARGLGQLIRAKNIKTIGDLSTLTASEIKTLPIRSPKVSNVKKALRIYHEQQV |
| | KTRGLEEIPVFDISEKTVNGIENKSLSPDEERLVSDIIDPVALEIPLSKNLLAQISALAL |
| | QLDSEDLHNYSGSQLFEMHEKLSCMANSVIKNLQSRWRSPSHENSI |
| PTIP (also | >sp\|Q6ZW49\|PAXI1_HUMAN PAX-interacting protein 1 OS = Homo sapiens |
| called PAXIP1) | GN = PAXIP1 PE = 1 SV = 2 (SEQ ID NO: 300) |
| | MSDQAPKVPEEMFREVKYYAVGDIDPQVIQLLKAGKAKEVSYNALASHIISEDGDNPEVG |
| | EAREVFDLPVVKPSWVILSVQCGTLLPVNGFSPESCQIFFGITACLSQVSSEDRSALWAL |
| | VTFYGGDCQLTLNKKCTHLIVPEPKGEKYECALKRASIKIVTPDWVLDCVSEKTKKDEAF |
| | YHPRLIIYEEEEEEEEEEEEVENEEQDSQNEGSTDEKSSPASSQEGSPSGDQQFSPKSNT |
| | EKSKGELMFDDSSDSSPEKQERNLNWTPAEVPQLAAAKRRLPQGKEPGLINLCANVPPVP |
| | GNILPPEVRGNLMAAGQNLQSSERSEMIATWSPAVRTLRNITNNADIQQMNRPSNVAHIL |
| | QTLSAPTKNLEQQVNHSQQGHTNANAVLFSQVKVTPETHMLQQQQQAQQQQQQHPVLHLQ |
| | PQQIMQLQQQQQQQISQQPYPQQPPHPFSQQQQQQQQAHPHQFSQQQLQFPQQQLHPPQQ |
| | LHRPQQQLQPFQQQHALQQQFHQLQQHQLQQQQLAQLQQQHSLLQQQQQQQIQQQQLQRM |
| | HQQQQQQQMQSQTAPHLSQTSQALQHQVPPQQPPQQQQQQQPPPSPQQHQLFGHDPAVEI |
| | PEEGFLLGCVFAIADYPEQMSDKQLLATWKRITQAHGGTVDPTFTSRCTHLLCESQVSSA |
| | YAQAIRERKRCVTAHWLNTVLKKKKMVPPHRALHFPVAFPPGGKPCSQHIISVTGFVDSD |
| | RDDLKLMAYLAGAKYTGYLCRSNTVLICKEPTGLKYEKAKEWRIPCVNAQWLGDILLGNF |
| | EALRQIQYSRYTAFSLQDPFAPTQHLVLNLLDAWRVPLKVSAELLMSIRLPPKLKQNEVA |
| | NVQPSSKRARIEDVPPPTKKLTPELTPFVLFTGFEPVQVQQYIKKLYILGGEVAESAQKC |
| | THLIASKVTRTVKFLTAISVVKHIVTPEWLEECFRCQKFIDEQNYILRDAEAEVLFSFSL |
| | EESLKRAHVSPLFKAKYFYITPGICPSLSTMKAIVECAGGKVLSKQPSFRKLMEHKQNSS |
| | LSEIILISCENDLHLCREYFARGIDVHNAEFVLTGVLTQTLDYESYKFN |
| | >sp\|Q6ZW49-2\|PAXI1_HUMAN Isoform 3 of PAX-interacting protein 1 |
| | OS = Homo sapiens GN = PAXIP1 (SEQ ID NO: 301) |
| | MFDDSSDSSPEKQERNLNWTPAEVPQLAAAKRRLPQGKEPGLINLCANVPPVPGNILPPE |
| | VRGNLMAAGQNLQSSERSEMIATWSPAVRTLRNITNNADIQQMNRPSNVAHILQTLSAPT |
| | KNLEQQVNHSQQGHTNANAVLFSQVKVTPETHMLQQQQQAQQQQQQHPVLHLQPQQIMQL |
| | QQQQQQQISQQPYPQQPPHPFSQQQQQQQQAHPHQFSQQQLQFPQQQLHPPQQLHRPQQQ |
| | LQPFQQQHALQQQFHQLQQHQLQQQQLAQLQQQHSLLQQQQQQQIQQQQLQRMHQQQQQQ |
| | QMQSQTAPHLSQTSQALQHQVPPQQPPQQQQQQQPPPSPQQHQLFGHDPAVEIPEEGFLL |
| | GCVFAIADYPEQMSDKQLLATWKRITQAHGGTVDPTFTSRCTHLLCESQVSSAYAQAIRE |
| | RKRCVTAHWLNTVLKKKKMVPPHRALHFPVAFPPGGKPCSQHIISVTGFVDSDRDDLKLM |
| | AYLAGAKYTGYLCRSNTVLICKEPTGLKYEKAKEWRIPCVNAQWLGDILLGNFEALRQIQ |
| | YSRYTAFSLQDPFAPTQHLVLNLLDAWRVPLKVSAELLMSIRLPPKLKQNEVANVQPSSK |
| | RARIEDVPPPTKKLTPELTPFVLFTGFEPVQVQQYIKKLYILGGEVAESAQKCTHLIASK |
| | VTRTVKFLTAISVVKHIVTPEWLEECFRCQKFIDEQNYILRDAEAEVLFSFSLEESLKRA |
| | HVSPLFKAKYFYITPGICPSLSTMKAIVECAGGKVLSKQPSFRKLMEHKQNSSLSEIILI |
| | SCENDLHLCREYFARGIDVHNAEFVLTGVLTQTLDYESYKFN |
| | >sp\|Q6ZW49\|PAXI1_HUMAN PAX-interacting protein 1 OS = Homo sapiens |
| | GN = PAXIP1 PE = 1 SV = 2 (SEQ ID NO: 302) |
| | MSDQAPKVPEEMFREVKYYAVGDIDPQVIQLLKAGKAKEVSYNALASHIISEDGDNPEVG |
| | EAREVFDLPVVKPSWVILSVQCGTLLPVNGFSPESCQIFFGITACLSQVSSEDRSALWAL |
| | VTFYGGDCQLTLNKKCTHLIVPEPKGEKYECALKRASIKIVTPDWVLDCVSEKTKKDEAF |
| | YHPRLIIYEEEEEEEEEEEEVENEEQDSQNEGSTDEKSSPASSQEGSPSGDQQFSPKSNT |
| | EKSKGELMFDDSSDSSPEKQERNLNWTPAEVPQLAAAKRRLPQGKEPGLINLCANVPPVP |
| | GNILPPEVRGNLMAAGQNLQSSERSEMIATWSPAVRTLRNITNNADIQQMNRPSNVAHIL |
| | QTLSAPTKNLEQQVNHSQQGHTNANAVLFSQVKVTPETHMLQQQQQAQQQQQQHPVLHLQ |
| | PQQIMQLQQQQQQQISQQPYPQQPPHPFSQQQQQQQQAHPHQFSQQQLQFPQQQLHPPQQ |
| | LHRPQQQLQPFQQQHALQQQFHQLQQHQLQQQQLAQLQQQHSLLQQQQQQQIQQQQLQRM |
| | HQQQQQQQMQSQTAPHLSQTSQALQHQVPPQQPPQQQQQQQPPPSPQQHQLFGHDPAVEI |
| | PEEGFLLGCVFAIADYPEQMSDKQLLATWKRITQAHGGTVDPTFTSRCTHLLCESQVSSA |
| | YAQAIRERKRCVTAHWLNTVLKKKKMVPPHRALHFPVAFPPGGKPCSQHIISVTGFVDSD |
| | RDDLKLMAYLAGAKYTGYLCRSNTVLICKEPTGLKYEKAKEWRIPCVNAQWLGDILLGNF |
| | EALRQIQYSRYTAFSLQDPFAPTQHLVLNLLDAWRVPLKVSAELLMSIRLPPKLKQNEVA |
| | NVQPSSKRARIEDVPPPTKKLTPELTPFVLFTGFEPVQVQQYIKKLYILGGEVAESAQKC |
| | THLIASKVTRTVKFLTAISVVKHIVTPEWLEECFRCQKFIDEQNYILRDAEAEVLFSFSL |
| | EESLKRAHVSPLFKAKYFYITPGICPSLSTMKAIVECAGGKVLSKQPSFRKLMEHKQNSS |
| | LSEIILISCENDLHLCREYFARGIDVHNAEFVLTGVLTQTLDYESYKFN |
| DNA polymerase | — |

[1353] More specifically, in some embodiments canonical NHEJ is down-regulated using NU7441 (which inhibits mTor and DNA Pk; see, e.g., Robert et al. (2015) GENOME MED. 7(1): 93), KU-0060648 (which also inhibits DNA Pk; see, e.g., Robert et al. (2015)), CC 115 (which inhibits mTor and DNA Pk), NK314 (which inhibits a topoisomerase and DNA Pk), or an siRNA against 53BP1, or an agent of Table VI.8, or any combination thereof.

TABLE VI.8
Down-regulators of the canonical NHEJ pathway.
1. DNA Pk Inhibitors

| Compounds | Phase | Target |
|---|---|---|
| NU7441 | | mTor and |
| | | DNAPk |
| KU-0060648 | | DNAPk |
| CC115 | Phase I | mTor and |
| | | DNAPk |
| NK314 | Phase I | Topo and |
| | | DNAPk |
| Wortmannin | | |
| LY294002 | | |
| NU 7026 | | |
| IC86621 | | |
| IC87102 | | |
| IC87361 | | |
| OK1035 | | |
| SU11752 | | |
| IC486241 | | |
| Vaillin | | |

siRNAs
Accell Human PRKDC siRNA, sold by Dharmacon
PRKDC Silencer, sold by Life Technologies
antibodies
DNA-Pk antibody, sold by Biorbyt
Anti-DNA-PK (Ab-2) Mouse mAh (18-2), sold by EMD Millipore
2. LigIV

| Compounds | Reference(s) |
|---|---|
| SCR7 | See, e.g., Srivastava et al. (2012) CELL 151(7): 1474-1487; and |
| | Maruyama et al. (2015) NAT BIOTECHNOL. 33(5): 538-42. |

siRNA
Commercially available from Dharmacon or Ambion
3. 53BP1
siRNAs
TP53BP1 Silencer, sold by Life Technologies
Accell Human TP53BP1 siRNA, sold by Dharmacon
CAGATATCAGCTTAGACAA (SEQ ID NO: 303)
antibodies
Anti-53BP1, clone BP13, sold by EMD Millipore
TP53BP1 monoclonal antibody (M01), clone 1B9, sold by Abnova Corporation
4. Rif1-interacting with 53BP1

| | |
|---|---|
| siRNA | Commercially available from Dharmacon or Ambion |

5. PTIP-interacting with 53BP1

| | |
|---|---|
| siRNA | Commercially available from Dharmacon or Ambion |

### VI.4 Alternative Non-Homologous End-Joining (Alt-NHEJ)

[1354] Alt-NHEJ appears to encompass a variety of different DNA repair processes, including blut EJ, MMEJ, and SD-MMEJ (see FIG. 1). The common feature is that alt-NHEJ is independent from KU70/80 and Xrcc4/Ligase IV, and is associated with deletion at the repair junctions.

[1355] Alternative NHEJ has different subclasses, some of which have specific names like: MMEJ (microhomology mediated end-joining) and SDMMEJ (synthesis dependent micro homology mediated end-joining), and others that do not have specific names but are characterized by not having any microhomology at the break-point. In MMEJ, a limited amount of resection occurs and there is microhomology at the break site (typically 5-25 bp); MMEJ is one of the most abundant and characterized types of alt-NHEJ. In SDMMEJ, there is de novo synthesis by an accurate non-processive DNA polymerase that creates microhomology.

[1356] Alt-NHEJ is also mostly independent from DNAPk (a key participant in canonical NHEJ, as discussed above), and is instead dependent on the MRN complex (composed of MRE11, Rad50 and Nbs1) and CtIP, both of which participate in resection.

[1357] PARP1/2 have been postulated to have a role in protecting the ends and preventing the recruitment of KU, thereby promoting the alternative mechanisms and resection.

[1358] Alt-NHEJ is cell cycle independent; it can occur in G1, where limited resection is present and exposes the micro-homology or, alternatively, a helicase might expose the microhomology (as occurs in MMEJ). Polymerases can fill in the gap and the XPF/ERCC1 complex (which is an endonuclease component also involved in NER and SSA) has a role in removing the DNA flap (the displaced strand that gets created). Finally, ligase I and a complex of XRCC1 and ligase III appear to have a role in the ligation of the ends. The latter two factors are also involved in NER, BER and SSBR.

[1359] Microhomology Mediated End-Joining (MMEJ)

[1360] In some embodiments, MMEJ is down-regulated in order to promote HDR. MMEJ is a type of alt-NHEJ. MMEJ typically acts where there has been a small degree of resection (e.g., 5-25 nt) at the break. It may be considered a backup pathway for situations where NHEJ fails.

[1361] The initial phase of MMEJ involves recognition of the break. PARP1/2, which binds to double strand breaks, can promote MMEJ. Next, the cell performs resection over a short distance from the break site. CtIP performs some resection in G1, which can also promote MMEJ. Next, the single stranded microhomology domains anneal with each other and LIG-3 performs DNA end ligation.

[1362] Synthesis Dependent Microhomology Mediated End-Joining (SSMMEJ)

[1363] In some embodiments, SDMMEJ is down-regulated in order to promote HDR. One of the best-reported proteins involved in SDMMEJ is Polymerase Theta (Pol Theta). Accordingly, in some embodiments, Pol Theta is inhibited in order to promote HDR.

[1364] In some embodiments, the methods herein involve down-regulating alt-NHEJ, e.g., MMEJ and/or SDMMEJ, in order to promote HDR. For instance, the methods may involve modulating, e.g., inhibiting, a component (e.g., exactly one component, or one or more components, e.g., two or three components) of the MMEJ pathway, e.g., a component of Table VI.9 or Table VI.1(J). More specifically, the methods may involve modulating, e.g., inhibiting, exactly one of, or one or more of a PARP, PARP1, PARP2, CtIP, and LIG-3. In another embodiment, the methods may involve modulating, e.g., inhibiting, Pol Theta. Up-regulation of HDR, in some embodiments, is achieved using siRNA directed against one or more of the components listed in Table VI.9 or Table VI.1(J). In some embodiments, an alt-NHEJ pathway is down regulated using an HDR-enhancing gRNA that targets a component of an alt-NHEJ pathway, e.g., one or more of the components listed in Table VI.9 or Table VI.1(J) (e.g., a PARP, PARP1, PARP2, CtIP, and LIG-3). In some embodiments, the HDR-enhancing gRNA is used in combination with an eiCas9 molecule. In some embodiments, the HDR-enhancing gRNA is used in combination with an eaCas9 molecule. In some embodiments, the HDR-enhancing gRNA is administered to the cell as a HDR-enhancing gRNA:Cas9 molecule complex.

[1365] In embodiments, one or more of HDR, alt-HR, anti-HR, NHEJ, SSA, SSBR, MMR, NER, and BER are not substantially down-regulated, e.g., the only DNA damage repair pathway to be substantially down-regulated is an alt-NHEJ pathway such as MMEJ pathway and/or SDMMEJ.

TABLE VI.9
Factors that promote alt-NHEJ

| | |
|---|---|
| a PARP | — |
| PARP1 | See Table VI.2 |
| PARP2 | See Table VI.2 |
| CtIP | See Table VI.2 |
| LIG-3 | MSLAFKIFFPQTLRALSRKELCLFRKHHWRDVRQFSQWSETDLLHGHPLFLRRKPVLSFQGSHLRSRATY |
| | LVFLPGLHVGLCSGPCEMAEQRFCVDYAKRGTAGCKKCKEKIVKGVCRIGKVVPNPFSESGGDMKEWYHI |
| | KCMFEKLERARATTKKIEDLTELEGWEELEDNEKEQITQHIADLSSKAAGTPKKKAVVQAKLTTTGQVTS |
| | PVKGASFVTSTNPRKFSGFSAKPNNSGEAPSSPTPKRSLSSSKCDPRHKDCLLREFRKLCAMVADNPSYN |
| | TKTQIIQDFLRKGSAGDGFHGDVYLTVKLLLPGVIKTVYNLNDKQIVKLFSRIFNCNPDDMARDLEQGDV |
| | SETIRVFFEQSKSFPPAAKSLLTIQEVDEFLLRLSKLTKEDEQQQALQDIASRCTANDLKCIIRLIKHDL |
| | KMNSGAKHVLDALDPNAYEAFKASRNLQDVVERVLHNAQEVEKEPGQRRALSVQASLMTPVQPMLAEACK |
| | SVEYAMKKCPNGMFSEIKYDGERVQVHKNGDHFSYFSRSLKPVLPHKVAHFKDYIPQAFPGGHSMILDSE |
| | VLLIDNKTGKPLPFGTLGVHKKAAFQDANVCLFVFDCIYFNDVSLMDRPLCERRKFLHDNMVEIPNRIMF |
| | SEMKRVTKALDLADMITRVIQEGLEGLVLKDVKGTYEPGKRHWLKVKKDYLNEGAMADTADLVVLGAFYG |
| | QGSKGGMMSIFLMGCYDPGSQKWCTVTKCAGGHDDATLARLQNELDMVKISKDPSKIPSWLKVNKIYYPD |
| | FIVPDPKKAAVWEITGAEFSKSEAHTADGISIRFPRCTRIRDDKDWKSATNLPQLKELYQLSKEKADFTV |
| | VAGDEGSSTTGGSSEENKGPSGSAVSRKAPSKPSASTKKAEGKLSNSNSKDGNMQTAKPSAMKVGEKLAT |
| | KSSPVKVGEKRKAADETLCQTKRRPASEQRGRTVPAGRR (LIG3 sequence 1) |
| | (SEQ ID NO: 304) |
| | MSLAFKIFFPQTLRALSRKELCLFRKHHWRDVRQFSQWSETDLLHGHPLFLRRKPVLSFQGSHLRSRATY |
| | LVFLPGLHVGLCSGPCEMAEQRFCVDYAKRGTAGCKKCKEKIVKGVCRIGKVVPNPFSESGGDMKEWYHI |
| | KCMFEKLERARATTKKIEDLTELEGWEELEDNEKEQITQHIADLSSKAAGTPKKKAVVQAKLTTTGQVTS |
| | PVKGASFVTSTNPRKFSGFSAKPNNSGEAPSSPTPKRSLSSSKCDPRHKDCLLREFRKLCAMVADNPSYN |
| | TKTQIIQDFLRKGSAGDGFHGDVYLTVKLLLPGVIKTVYNLNDKQIVKLFSRIFNCNPDDMARDLEQGDV |
| | SETIRVFFEQSKSFPPAAKSLLTIQEVDEFLLRLSKLTKEDEQQQALQDIASRCTANDLKCIIRLIKHDL |
| | KMNSGAKHVLDALDPNAYEAFKASRNLQDVVERVLHNAQEVEKEPGQRRALSVQASLMTPVQPMLAEACK |
| | SVEYAMKKCPNGMFSEIKYDGERVQVHKNGDHFSYFSRSLKPVLPHKVAHFKDYIPQAFPGGHSMILDSE |
| | VLLIDNKTGKPLPFGTLGVHKKAAFQDANVCLFVFDCIYFNDVSLMDRPLCERRKFLHDNMVEIPNRIMF |
| | SEMKRVTKALDLADMITRVIQEGLEGLVLKDVKGTYEPGKRHWLKVKKDYLNEGAMADTADLVVLGAFYG |
| | QGSKGGMMSIFLMGCYDPGSQKWCTVTKCAGGHDDATLARLQNELDMVKISKDPSKIPSWLKVNKIYYPD |
| | FIVPDPKKAAVWEITGAEFSKSEAHTADGISIRFPRCTRIRDDKDWKSATNLPQLKELYQLSKEKADFTV |
| | VAGDEGSSTTGGSSEENKGPSGSAVSRKAPSKPSASTKKAEGKLSNSNSKDGNMQTAKPSAMKVGEKLAT |
| | KSSPVKVGEKRKAADETLCQTKVLLDIFTGVRLYLPPSTPDFSRLRRYFVAFDGDLVQEFDMTSATHVLG |
| | SRDKNPAAQQVSPEWIWACIRKRRLVAPC (LIG3 sequence 2) (SEQ ID NO: 305) |
| | MVDVLLLFSLCLLFHISRPDLSHNRLSFIKASSMSHLQSLREVKLNNNELETIPNLGPVS |
| | ANITLLSLAGNRIVEILPEHLKEFQSLETLDLSSNNISELQTAFPALQLKYLYLNSNRVT |
| | SMEPGYFDNLANTLLVLKLNRNRISAIPPKMFKLPQLQHLELNRNKIKNVDGLTFQGLGA |
| | LKSLKMQRNGVTKLMDGAFWGLSNMEILQLDHNNLTEITKGWLYGLLMLQELHLSQNAIN |
| | RISPDAWEFCQKLSELDLTFNHLSRLDDSSFLGLSLLNTLHIGNNRVSYIADCAFRGLSS |
| | LKTLDLKNNEISWTIEDMNGAFSGLDKLRRLILQGNRIRSITKKAFTGLDALEHLDLSDN |
| | AIMSLQGNAFSQMKKLQQLHLNTSSLLCDCQLKWLPQWVAENNFQSFVNASCAHPQLLKG |
| | RSIFAVSPDGFVCDDFPKPQITVQPETQSAIKGSNLSFICSAASSSDSPMTFAWKKDNEL |
| | LHDAEMENYAHLRAQGGEVMEYTTILRLREVEFASEGKYQCVISNHFGSSYSVKAKLTVN |
| | MLPSFTKTPMDLTIRAGAMARLECAAVGHPAPQIAWQKDGGTDFPAARERRMHVMPEDDV |
| | FFIVDVKIEDIGVYSCTAQNSAGSISANATLTVLETPSFLRPLLDRTVTKGETAVLQCIA |
| | GGSPPPKLNWTKDDSPLVVTERHFFAAGNQLLIIVDSDVSDAGKYTCEMSNTLGTERGNV |
| | RLSVIPTPTCDSPQMTAPSLDDDGWATVGVVIIAVVCCVVGTSLVWVVIIYHTRRRNEDC |
| | SITNTDETNLPADIPSYLSSQGTLADRQDGYVSSESGSHHQFVTSSGAGFFLPQHDSSGT |
| | CHIDNSSEADVEAATDLFLCPFLGSTGPMYLKGNVYGSDPFETYHTGCSPDPRTVLMDHY |
| | EPSYIKKKECYPCSHPSEESCERSFSNISWPSHVRKLLNTSYSHNEGPGMKNLCLNKSSL |
| | DFSANPEPASVASSNSFMGTFGKALRRPHLDAYSSFGQPSDCQPRAFYLKAHSSPDLDSG |
| | SEEDGKERTDFQEENHICTFKQTLENYRTPNFQSYDLDT (LIG3 sequence 3) |
| | (SEQ ID NO: 306) |
| MRE11 | See Table VI.2 |
| Rad50 | See Table VI.2 |
| Nbs1 | See Table VI.2 |
| CtIP | See Table VI.2 |
| XPF | MESGQPARRIAMAPLLEYERQLVLELLDTDGLVVCARGLGADRLLYHFLQLHCHPACLVL |
| | VLNTQPAEEEYFINQLKIEGVEHLPRRVTNEITSNSRYEVYTQGGVIFATSRILVVDFLT |
| | DRIPSDLITGILVYRAHRIIESCQEAFILRLFRQKNKRGFIKAFTDNAVAFDTGFCHVER |
| | VMRNLFVRKLYLWPRFHVAVNSFLEQHKPEVVEIHVSMTPTMLAIQTAILDILNACLKEL |
| | KCHNPSLEVEDLSLENAIGKPFDKTIRHYLDPLWHQLGAKTKSLVQDLKILRTLLQYLSQ |
| | YDCVTFLNLLESLRATEKAFGQNSGWLFLDSSTSMFINARARVYHLPDAKMSKKEKISEK |
| | MEIKEGEETKKELVLESNPKWEALTEVLKEIEAENKESEALGGPGQVLICASDDRTCSQL |
| | RDYITLGAEAFLLRLYRKTFEKDSKAEEVWMKFRKEDSSKRIRKSHKRPKDPQNKERAST |
| | KERTLKKKKRKLTLTQMVGKPEELEEEGDVEEGYRREISSSPESCPEEIKHEEFDVNLSS |
| | DAAFGILKEPLTIIHPLLGCSDPYALTRVLHEVEPRYVVLYDAELTFVRQLEIYRASRPG |
| | KPLRVYFLIYGGSTEEQRYLTALRKEKEAFEKLIREKASMVVPEEREGRDETNLDLVRGT |
| | ASADVSTDTRKAGGQEQNGTQQSIVVDMREFRSELPSLIHRRGIDIEPVTLEVGDYILTP |
| | EMCVERKSISDLIGSLNNGRLYSQCISMSRYYKRPVLLIEFDPSKPFSLTSRGALFQEIS |
| | SNDISSKLTLLTLHFPRLRILWCPSPHATAELFEELKQSKPQPDAATALAITADSETLPE |
| | SEKYNPGPQDFLLKMPGVNAKNCRSLMHHVKNIAELAALSQDELTSILGNAANAKQLYDF |
| | IHTSFAEVVSKGKGKK (XPF CCDS 32390.1) (SEQ ID NO: 307) |
| ERCC1 | >sp\|P07992\|ERCC1_HUMAN DNA excision repair protein ERCC-1 |
| | OS = Homo sapiens GN = ERCC1 PE = 1 SV = 1 (SEQ ID NO: 308) |
| | MDPGKDKEGVPQPSGPPARKKFVIPLDEDEVPPGVAKPLFRSTQSLPTVDTSAQAAPQTY |
| | AEYAISQPLEGAGATCPTGSEPLAGETPNQALKPGAKSNSIIVSPRQRGNPVLKFVRNVP |
| | WEFGDVIPDYVLGQSTCALFLSLRYHNLHPDYIHGRLQSLGKNFALRVLLVQVDVKDPQQ |
| | ALKELAKMCILADCTLILAWSPEEAGRYLETYKAYEQKPADLLMEKLEQDFVSRVTECLT |
| | TVKSVNKTDSQTLLTTFGSLEQLIAASREDLALCPGLGPQKARRLFDVLHEPFLKVP |
| | >sp\|P07992-2\|ERCC1_HUMAN Isoform 2 of DNA excision repair protein |
| | ERCC-1 OS = Homo sapiens GN = ERCC1 (SEQ ID NO: 309) |
| | MDPGKDKEGVPQPSGPPARKKFVIPLDEDEVPPGVAKPLFRSTQSLPTVDTSAQAAPQTY |
| | AEYAISQPLEGAGATCPTGSEPLAGETPNQALKPGAKSNSIIVSPRQRGNPVLKFVRNVP |
| | WEFGDVIPDYVLGQSTCALFLSLRYHNLHPDYIHGRLQSLGKNFALRVLLVQVDVKDPQQ |
| | ALKELAKMCILADCTLILAWSPEEAGRYLETYKAYEQKPADLLMEKLEQDFVSRSLEQLI |
| | AASREDLALCPGLGPQKARRLFDVLHEPFLKVP |
| | >sp\|P07992-3\|ERCC1_HUMAN Isoform 3 of DNA excision repair protein |
| | ERCC-1 OS = Homo sapiens GN = ERCC1 (SEQ ID NO: 310) |
| | MDPGKDKEGVPQPSGPPARKKFVIPLDEDEVPPGVAKPLFRSTQSLPTVDTSAQAAPQTY |
| | AEYAISQPLEGAGATCPTGSEPLAGETPNQALKPGAKSNSIIVSPRQRGNPVLKFVRNVP |
| | WEFGDVIPDYVLGQSTCALFLSLRYHNLHPDYIHGRLQSLGKNFALRVLLVQVDVKDPQQ |
| | ALKELAKMCILADCTLILAWSPEEAGRYLETYKAYEQKPADLLMEKLEQDFVSRVTECLT |
| | TVKSVNKTDSQTLLTTFGSLEQLIAASREDLALCPGLGPQKVRALGKNPRSWGKERAPNK |
| | HNLRPQSFKVKKEPKTRHSGFRL |
| | >sp\|P07992-4\|ERCC1_HUMAN Isoform 4 of DNA excision repair protein |
| | ERCC-1 OS = Homo sapiens GN = ERCC1 (SEQ ID NO: 311) |
| | MDPGKDKEGVPQPSGPPARKKFVIPLDEDEVPPGVRGNPVLKFVRNVPWEFGDVIPDYVL |
| | GQSTCALFLSLRYHNLHPDYIHGRLQSLGKNFALRVLLVQVDVKDPQQALKELAKMCILA |
| | DCTLILAWSPEEAGRYLETYKAYEQKPADLLMEKLEQDFVSRVTECLTTVKSVNKTDSQT |
| | LLTTFGSLEQLIAASREDLALCPGLGPQKARRLFDVLHEPFLKVP |
| Ligase-1 (LIG1) | MQRSIMSFFHPKKEGKAKKPEKEASNSSRETEPPPKAALKEWNGVVSESDSPVKRPGRKAARVLGSEGEE |
| | EDEALSPAKGQKPALDCSQVSPPRPATSPENNASLSDTSPMDSSPSGIPKRRTARKQLPKRTIQEVLEEQ |
| | SEDEDREAKRKKEEEEEETPKESLTEAEVATEKEGEDGDQPTTPPKPLKTSKAETPTESVSEPEVATKQE |
| | LQEEEEQTKPPRRAPKTLSSFFTPRKPAVKKEVKEEEPGAPGKEGAAEGPLDPSGYNPAKNNYHPVEDAC |
| | WKPGQKVPYLAVARTFEKIEEVSARLRMVETLSNLLRSVVALSPPDLLPVLYLSLNHLGPPQQGLELGVG |
| | DGVLLKAVAQATGRQLESVRAEAAEKGDVGLVAENSRSTQRLMLPPPPLTASGVFSKFRDIARLTGSAST |
| | AKKIDIIKGLFVACRHSEARFIARSLSGRLRLGLAEQSVLAALSQAVSLTPPGQEFPPAMVDAGKGKTAE |
| | ARKTWLEEQGMILKQTFCEVPDLDRIIPVLLEHGLERLPEHCKLSPGIPLKPMLAHPTRGISEVLKRFEE |
| | AAFTCEYKYDGQRAQIHALEGGEVKIFSRNQEDNTGKYPDIISRIPKIKLPSVTSFILDTEAVAWDREKK |
| | QIQPFQVLTTRKRKEVDASEIQVQVCLYAFDLIYLNGESLVREPLSRRRQLLRENFVETEGEFVFATSLD |
| | TKDIEQIAEFLEQSVKDSCEGLMVKTLDVDATYEIAKRSHNWLKLKKDYLDGVGDTLDLVVIGAYLGRGK |
| | RAGRYGGFLLASYDEDSEELQAICKLGTGFSDEELEEHHQSLKALVLPSPRPYVRIDGAVIPDHWLDPSA |
| | VWEVKCADLSLSPIYPAARGLVDSDKGISLRFPRFIRVREDKQPEQATTSAQVACLYRKQSQIQNQQGED |
| | SGSDPEDTY (LIG1 sequence 1) (SEQ ID NO: 312) |
| | MQRSIMAALKEWNGVVSESDSPVKRPGRKAARVLGSEGEEEDEALSPAKGQKPALDCSQVSPPRPATSPE |
| | NNASLSDTSPMDSSPSGIPKRRTARKQLPKRTIQEVLEEQSEDEDREAKRKKEEEEETPKESLTEAEVAT |
| | EKEGEDGDQPTTPPKPLKTSKAETPTESVSEPEVATKQELQEEEEQTKPPRRAPKTLSSFFTPRKPAVKK |
| | EVKEEEPGAPGKEGAAEGPLDPSGYNPAKNNYHPVEDACWKPGQKVPYLAVARTFEKIEEVSARLRMVET |
| | LSNLLRSVVALSPPDLLPVLYLSLNHLGPPQQGLELGVGDGVLLKAVAQATGRQLESVRAEAAEKGDVGL |
| | VAENSRSTQRLMLPPPPLTASGVFSKFRDIARLTGSASTAKKIDIIKGLFVACRHSEARFIARSLSGRLR |
| | LGLAEQSVLAALSQAVSLTPPGQEFPPAMVDAGKGKTAEARKTWLEEQGMILKQTFCEVPDLDRIIPVLL |
| | EHGLERLPEHCKLSPGIPLKPMLAHPTRGISEVLKRFEEAAFTCEYKYDGQRAQIHALEGGEVKIFSRNQ |
| | EDNTGKYPDIISRIPKIKLPSVTSFILDTEAVAWDREKKQIQPFQVLTTRKRKEVDASEIQVQVCLYAFD |
| | LIYLNGESLVREPLSRRRQLLRENFVETEGEFVFATSLDTKDIEQIAEFLEQSVKDSCEGLMVKTLDVDA |
| | TYEIAKRSHNWLKLKKDYLDGVGDILDLVVIGAYLGRGKRAGRYGGFLLASYDEDSEELQAICKLGTGFS |
| | DEELEEHHQSLKALVLPSPRPYVRIDGAVIPDHWLDPSAVWEVKCADLSLSPIYPAARGLVDSDKGISLR |
| | FPRFIRVREDKQPEQATTSAQVACLYRKQSQIQNQQGEDSGSDPEDTY (LIG1 sequence 2) |
| | (SEQ ID NO: 313) |
| | MQRSIMSFFHPKKEGKAKKPEKEASNSSRETEPPPKAALKEWNGVVSESDSPVKRPGRKAARVLGSEGEE |
| | EDEALSPAKGQKPALDCSQVSPPRPATSPENNASLSDTSPMDSSPSGIPKRRTEAETPTESVSEPEVATK |
| | QELQEEEEQTKPPRRAPKTLSSFFTPRKPAVKKEVKEEEPGAPGKEGAAEGPLDPSGYNPAKNNYHPVED |
| | ACWKPGQKVPYLAVARTFEKIEEVSARLRMVETLSNLLRSVVALSPPDLLPVLYLSLNHLGPPQQGLELG |
| | VGDGVLLKAVAQATGRQLESVRAEAAEKGDVGLVAENSRSTQRLMLPPPPLTASGVFSKFRDIARLTGSA |
| | STAKKIDIIKGLFVACRHSEARFIARSLSGRLRLGLAEQSVLAALSQAVSLTPPGQEFPPAMVDAGKGKT |
| | AEARKTWLEEQGMILKQTFCEVPDLDRIIPVLLEHGLERLPEHCKLSPGIPLKPMLAHPTRGISEVLKRF |
| | EEAAFTCEYKYDGQRAQIHALEGGEVKIFSRNQEDNTGKYPDIISRIPKIKLPSVTSFILDTEAVAWDRE |
| | KKQIQPFQVLTTRKRKEVDASEIQVQVCLYAFDLIYLNGESLVREPLSRRRQLLRENFVETEGEFVFATS |
| | LDTKDIEQIAEFLEQSVKDSCEGLMVKTLDVDATYEIAKRSHNWLKLKKDYLDGVGDTLDLVVIGAYLGR |
| | GKRAGRYGGFLLASYDEDSEELQAICKLGTGFSDEELEEHHQSLKALVLPSPRPYVRIDGAVIPDHWLDP |
| | SAVWEVKCADLSLSPIYPAARGLVDSDKGISLRFPRFIRVREDKQPEQATTSAQVACLYRKQSQIQNQQG |
| | EDSGSDPEDTY (LIG1 sequence 3) (SEQ ID NO: 314) |
| Pol Theta | >sp\|O75417\|DPOLQ_HUMAN DNA polymerase theta OS = Homo sapiens |
| | GN = POLQ PE = 1 SV = 2 (SEQ ID NO: 315) |
| | MNLLRRSGKRRRSESGSDSFSGSGGDSSASPQFLSGSVLSPPPGLGRCLKAAAAGECKPT |
| | VPDYERDKLLLANWGLPKAVLEKYHSFGVKKMFEWQAECLLLGQVLEGKNLVYSAPTSAG |
| | KTLVAELLILKRVLEMRKKALFILPFVSVAKEKKYYLQSLFQEVGIKVDGYMGSTSPSRH |
| | FSSLDIAVCTIERANGLINRLIEENKMDLLGMVVVDELHMLGDSHRGYLLELLLTKICYI |
| | TRKSASCQADLASSLSNAVQIVGMSATLPNLELVASWLNAELYHTDFRPVPLLESVKVGN |
| | SIYDSSMKLVREFEPMLQVKGDEDHVVSLCYETICDNHSVLLFCPSKKWCEKLADIIARE |
| | FYNLHHQAEGLVKPSECPPVILEQKELLEVMDQLRRLPSGLDSVLQKTVPWGVAFHHAGL |
| | TFEERDIIEGAFRQGLIRVLAATSTLSSGVNLPARRVIIRTPIFGGRPLDILTYKQMVGR |
| | AGRKGVDTVGESILICKNSEKSKGIALLQGSLKPVRSCLQRREGEEVTGSMIRAILEIIV |
| | GGVASTSQDMHTYAACTFLAASMKEGKQGIQRNQESVQLGAIEACVMWLLENEFIQSTEA |
| | SDGTEGKVYHPTHLGSAILSSSLSPADTLDIFADLQRAMKGFVLENDLHILYLVIPMFED |
| | WITIDWYRFFCLWEKLPTSMKRVAELVGVEEGFLARCVKGKVVARTERQHRQMAIHKRFF |
| | TSLVLLDLISEVPLREINQKYGCNRGQIQSLQQSAAVYAGMITVFSNRLGWHNMELLLSQ |
| | FQKRLIFGIQRELCDLVRVSLLNAQRARVLYASGFHTVADLARANIVEVEVILKNAVPFK |
| | SARKAVDEEEEAVEERRNMRTIWVTGRKGLTEREAAALIVEEARMILQQDLVEMGVQWNP |
| | CALLHSSICSLTHSESEVKEHTFISQTKSSYKKLISKNKSNTIFSDSYIKHSPNIVQDLN |
| | KSREHTSSFNCNFQNGNQEHQICSIFRARKRASLDINKEKPGASQNEGKISDKKVVQTFS |
| | QKIKKAPLNFNSEKMSRSFRSWKRRKHLKRSRDSSPLKDSGACRIHLQGQILSNPSLCED |
| | PFILDEKKTEFRNSGPFAKNVSLSGKEKDNKTSFPLQIKQNCSWNITLINDNFVEHIVIG |
| | SQSKNVICQATSVVSEKGRGVAVEAEKINEVLIQNGSKNQNVYMKHHDIHPINQYLRKQS |
| | HEQTSTITKQKNIIERQMPCEAVSSYINRDSNVTINCERIKLNTEENKPSHFQALGDDIS |
| | RIVIPSEVLPSAGAFSKSEGQHENFLNISRLQEKTGTYTINKTKNNHVSDLGLVLCDFED |
| | SFYLDTQSEKIIQQMATENAKLGAKDINLAAGIMQKSLVQQNSMNSFQKECHIPFPAEQH |
| | PLGATKIDHLDLKTVGIMKQSSDSHGVDILTPESPIFHSPILLEENGLFLKKNEVSVIDS |
| | QLNSFLQGYQTQETVKPVILLIPQKRIPTGVEGECLPVPETSLNMSDSLLFDSFSDDYLV |
| | KEQLPDMQMKEPLPSEVISNHFSDSLCLQEDLIKKSNVNENQDTHQQLICSNDESIIFSE |
| | MDSVQMVEALDNVDIFPVQEKNHTVVSPRALELSDPVLDEHHQGDQDGGDQDERAEKSKL |
| | TGIRQNHSFIWSGASFDLSPGLQRILDKVSSPLENEKLKSMTINFSSLNRKNTELNEEQE |
| | VISNLETKQVQGISFSSNNEVKSKIEMLENNANHDETSSLLPRKESNIVDDNGLIPPIPI |
| | PTSASKLIFPGILETPVNPWKINNVLQPGESYLFGSPSDIKNHDLSPGSRNGFKDNSPIS |
| | DISFSLQLSQDGLQLTPASSSSESLSIIDVASDQNLFQTFIKEWRCKKRFSISLACEKIR |
| | SLISSKTATIGSRFKQASSPQEIPIRDDGFPIKGCDDILVVGLAVCWGGRDAYYFSLQKE |
| | QKHSEISASLVPPSLDPSLILKDRMWYLQSCLRKESDKECSVVIYDFIQSYKILLLSCGI |
| | SLEQSYEDPKVACWLLDPDSQEPTLHSIVISFLPHELPLLEGMETSQGIQSLGLNAGSEH |
| | SGRYRASVESILIFNSMNQLNSLLQKENLQDVFRKVEMPSQYCLALLELNGIGFSTAECE |
| | SQKHIMQAKLDAIETQAYQLAGHSFSFISSDDIAEVLFLELKLPPNREMKNQGSKKILGS |
| | TRRGIDNGRKLRLGRQFSTSKDVLNKLKALHPLPGLILEWRRITNAITKVVFPLQREKCL |
| | NPFLGMERIYPVSQSHTATGRITFTEPNIQNVPRDFEIKMPTLVGESPPSQAVGKGLLPM |
| | GRGKYKKGFSVNPRCQAQMEERAADRGMPFSISMRHAFVPFPGGSILAADYSQLELRILA |
| | HLSHDRRLIQVLNIGADVFRSIAAEWKMIEPESVGDDLRQQAKQICYGIIYGMGAKSLGE |
| | QMGIKENDAACYIDSFKSRYTGINQFMTETVKNCKRDGFVQTILGRRRYLPGIKDNNPYR |
| | KAHAERQAINTIVQGSAADIVKIATVNIQKQLETFHSTFKSHGHREGMLQSDQTGLSRKR |
| | KLQGMFCPIRGGFFILQLHDELLYEVAEEDVVQVAQIVKNEMESAVKLSVKLKVKVKIGA |
| | SWGELKDFDV |
| | >sp\|O75417-2\|DPOLQ_HUMAN Isoform 2 of DNA polymerase theta |
| | OS = Homo sapiens GN = POLQ (SEQ ID NO: 316) |
| | MNSFLSFPISLCSARKAVDEEEEAVEERRNMRTIWVTGRKGLTEREAAALIVEEARMILQ |
| | QDLVEMGVQWNPCALLHSSICSLTHSESEVKEHTFISQTKSSYKKLISKNKSNTIFSDSY |
| | IKHSPNIVQDLNKSREHTSSFNCNFQNGNQEHQICSIFRARKRASLDINKEKPGASQNEG |
| | KTSDKKVVQTFSQKIKKAPLNFNSEKMSRSFRSWKRRKHLKRSRDSSPLKDSGACRIHLQ |
| | GQILSNPSLCEDPFILDEKKTEFRNSGPFAKNVSLSGKEKDNKTSFPLQIKQNCSWNITL |
| | INDNFVEHIVIGSQSKNVICQATSVVSEKGRGVAVEAEKINEVLIQNGSKNQNVYMKHHD |
| | IHPINQYLRKQSHEQTSTITKQKNIIERQMPCEAVSSYINRDSNVTINCERIKLNTEENK |
| | PSHFQALGDDISRIVIPSEVLPSAGAFSKSEGQHENFLNISRLQEKTGTYTINKTKNNHV |
| | SDLGLVLCDFEDSFYLDTQSEKIIQQMATENAKLGAKDINLAAGIMQKSLVQQNSMNSFQ |
| | KECHIPFPAEQHPLGATKIDHLDLKTVGIMKQSSDSHGVDILTPESPIFHSPILLEENGL |
| | FLKKNEVSVTDSQLNSFLQGYQTQETVKPVILLIPQKRTPTGVEGECLPVPETSLNMSDS |
| | LLFDSFSDDYLVKEQLPDMQMKEPLPSEVTSNHFSDSLCLQEDLIKKSNVNENQDTHQQL |
| | TCSNDESIIFSEMDSVQMVEALDNVDIFPVQEKNHTVVSPRALELSDPVLDEHHQGDQDG |
| | GDQDERAEKSKLTGTRQNHSFIWSGASFDLSPGLQRILDKVSSPLENEKLKSMTINFSSL |
| | NRKNTELNEEQEVISNLETKQVQGISFSSNNEVKSKIEMLENNANHDETSSLLPRKESNI |
| | VDDNGLIPPTPIPTSASKLTFPGILETPVNPWKTNNVLQPGESYLFGSPSDIKNHDLSPG |
| | SRNGFKDNSPISDTSFSLQLSQDGLQLTPASSSSESLSIIDVASDQNLFQTFIKEWRCKK |
| | RFSISLACEKIRSLTSSKTATIGSRFKQASSPQEIPIRDDGFPIKGCDDTLVVGLAVCWG |
| | GRDAYYFSLQKEQKHSEISASLVPPSLDPSLTLKDRMWYLQSCLRKESDKECSVVIYDFI |
| | QSYKILLLSCGISLEQSYEDPKVACWLLDPDSQEPTLHSIVTSFLPHELPLLEGMETSQG |
| | IQSLGLNAGSEHSGRYRASVESILIFNSMNQLNSLLQKENLQDVFRKVEMPSQYCLALLE |
| | LNGIGFSTAECESQKHIMQAKLDAIETQAYQLAGHSFSFTSSDDIAEVLFLELKLPPNRE |
| | MKNQGSKKTLGSTRRGIDNGRKLRLGRQFSTSKDVLNKLKALHPLPGLILEWRRITNAIT |
| | KVVFPLQREKCLNPFLGMERTYPVSQSHTATGRITFTEPNIQNVPRDFEIKMPTLVGESP |
| | PSQAVGKGLLPMGRGKYKKGFSVNPRCQAQMEERAADRGMPFSISMRHAFVPFPGGSILA |
| | ADYSQLELRILAHLSHDRRLIQVLNTGADVFRSIAAEWKMIEPESVGDDLRQQAKQICYG |
| | ITYGMGAKSLGEQMGIKENDAACYIDSFKSRYTGINQFMTETVKNCKRDGFVQTILGRRR |
| | YLPGIKDNNPYRKAHAERQAINTIVQGSAADIVKIATVNIQKQLETFHSTFKSHGHREGM |
| | LQSDQTGLSRKRKLQGMFCPIRGGFFILQLHDELLYEVAEEDVVQVAQIVKNEMESAVKL |
| | SVKLKVKVKIGASWGELKDFDV |
| MRN complex | — |
| XRCC1 | >sp\|P18887\|XRCC1_HUMAN DNA repair protein XRCC1 |
| | OS = Homo sapiens GN = XRCC1 PE = 1 SV = 2 (SEQ ID NO: 317) |
| | MPEIRLRHVVSCSSQDSTHCAENLLKADTYRKWRAAKAGEKTISVVLQLEKEEQIHSVDI |
| | GNDGSAFVEVLVGSSAGGAGEQDYEVLLVTSSFMSPSESRSGSNPNRVRMFGPDKLVRAA |
| | AEKRWDRVKIVCSQPYSKDSPFGLSFVRFHSPPDKDEAEAPSQKVTVTKLGQFRVKEEDE |
| | SANSLRPGALFFSRINKTSPVTASDPAGPSYAAATLQASSAASSASPVSRAIGSTSKPQE |
| | SPKGKRKLDLNQEEKKTPSKPPAQLSPSVPKRPKLPAPTRTPATAPVPARAQGAVTGKPR |
| | GEGTEPRRPRAGPEELGKILQGVVVVLSGFQNPFRSELRDKALELGAKYRPDWTRDSTHL |
| | ICAFANTPKYSQVLGLGGRIVRKEWVLDCHRMRRRLPSRRYLMAGPGSSSEEDEASHSGG |
| | SGDEAPKLPQKQPQTKTKPTQAAGPSSPQKPPTPEETKAASPVLQEDIDIEGVQSEGQDN |
| | GAEDSGDTEDELRRVAEQKEHRLPPGQEENGEDPYAGSTDENTDSEEHQEPPDLPVPELP |
| | DFFQGKHFFLYGEFPGDERRKLIRYVTAFNGELEDNMSDRVQFVITAQEWDPSFEEALMD |
| | NPSLAFVRPRWIYSCNEKQKLLPHQLYGVVPQA |

[1366] Inhibitors of some of the proteins of Table VI.9 above are listed elsewhere in this specification. In some embodiments alt-NHEJ is down-regulated using an agent of Table VI.10, or any combination thereof.

TABLE VI.10
Down-regulators of the alt-NHEJ pathway.

L67 (inhibits LIG1 and LIG3; reviewed in Tomkinson et al. (2013)
TRANSL. CANCER RES. 2(3): 1213.)
L82 (inhibits LIG1; reviewed in Tomkinson et al.)
L189 (inhibits LIG1, LIG3, and LIG4; reviewed in Tomkinson et al.)
SCR7 (inhibits LIG3 and LIG4; reviewed in Tomkinson et al.)

### VI.5 Single Strand Annealing (SSA)

[1367] Single strand annealing (SSA) is a that repairs double-stranded breaks. SSA is believed to be a sub-branch of HDR. As with HDR, a cell typically uses SSA when there has been significant resection at the break. Thus, SSA is characterized by having longer length of resection (longer than Alt-NHEJ) and a longer stretch of homology at the DSB site (>30 bp). SSA competes with HR in S phase.

[1368] As in other HDR pathways, resection leads to the formation of single stranded DNA regions. These regions are bound and stabilized by RPA, a heterotrimer comprising RPA1, RPA2, and RPA3. Whereas in the other HDR pathways, RAD51 binds the single stranded region, in the SSA pathway, RAD52 is involved. RAD52 promotes annealing of the two single stranded DNA segments at repetitive regions. Next, XPF/ERCC1 removes DNA flaps to make the DNA more suitable for ligation.

[1369] In some embodiments, other HDR pathways are promoted by down-regulating the SSA pathway. For example, in some embodiments, a Cas9 molecule and a gRNA can induce a DSB in a desired location during G2 or another phase of the cell cycle. This DSB can be formed using, e.g., one Cas9 molecule with the ability to produce DSBs, or two nickases. The DSB may undergo some resection, and/or may be created by a pair of staggered nicks that leaves some single stranded DNA at the break. In S/G2, an SSA down-regulator can increase the likelihood that a resected DSB is repaired by HDR. A template nucleic acid can be added to the cell, so that the HDR machinery repairs the DSB using the template nucleic acid.

[1370] Accordingly, in some embodiments, the methods herein involve down-regulating SSA in order to promote HDR pathways, such as HR and/or alt-HR. For instance, the methods may involve modulating, e.g., inhibiting, a component (e.g., exactly one component, or one or more components, e.g., two or three components) of the SSA pathway, e.g., a component of Table VI.1(E) or Table VI.11. More specifically, the methods may involve modulating, e.g., inhibiting, exactly one of, or one or more of RPA, RPA1, RPA2, RPA3, RAD52, XPF/ERCC1, and a ligase. Up-regulation of HDR, in some embodiments, is achieved using siRNA directed against one or more of the components listed in Table VI.1(E) or Table VI.11. In some embodiments, a SSA pathway is down regulated using an HDR-enhancing gRNA that targets a component of a SSA pathway, e.g., one or more of the components listed in Table VI.1(E) or Table VI.11 (e.g., RPA, RPA1, RPA2, RPA3, RAD52, XPF/ERCC1, and a ligase). In some embodiments, the HDR-enhancing gRNA is used in combination with an eiCas9 molecule. In some embodiments, the HDR-enhancing gRNA is used in combination with an eaCas9 molecule. In some embodiments, the HDR-enhancing gRNA is administered to the cell as a HDR-enhancing gRNA:Cas9 molecule complex.

[1371] In some embodiments, one or more of HR, alt-HR, anti-HR, NHEJ, MMEJ, SSBR, MMR, NER, and BER are not substantially down-regulated, e.g., the only DNA damage repair pathway to be substantially down-regulated is the SSA pathway.

TABLE VI.11
Factors that promote SSA

| | |
|---|---|
| RPA | — |
| RPA1 | >sp\|095602\|RPA1_HUMAN DNA-directed RNA polymerase I subunit RPA1 |
| | OS = Homo sapiens GN = POLR1A PE = 1 SV = 2 (SEQ ID NO: 318) |
| | MLISKNMPWRRLQGISFGMYSAEELKKLSVKSITNPRYLDSLGNPSANGLYDLALGPADS |
| | KEVCSTCVQDFSNCSGHLGHIELPLTVYNPLLFDKLYLLLRGSCLNCHMLTCPRAVIHLL |
| | LCQLRVLEVGALQAVYELERILNRFLEENPDPSASEIREELEQYTTEIVQNNLLGSQGAH |
| | VKNVCESKSKLIALFWKAHMNAKRCPHCKTGRSVVRKEHNSKLTITFPAMVHRTAGQKDS |
| | EPLGIEEAQIGKRGYLTPTSAREHLSALWKNEGFFLNYLFSGMDDDGMESRFNPSVFFLD |
| | FLVVPPSRYRPVSRLGDQMFTNGQTVNLQAVMKDVVLIRKLLALMAQEQKLPEEVATPTT |
| | DEEKDSLIAIDRSFLSTLPGQSLIDKLYNIWIRLQSHVNIVFDSEMDKLMMDKYPGIRQI |
| | LEKKEGLFRKHMMGKRVDYAARSVICPDMYINTNEIGIPMVFATKLTYPQPVTPWNVQEL |
| | RQAVINGPNVHPGASMVINEDGSRTALSAVDMTQREAVAKQLLTPATGAPKPQGTKIVCR |
| | HVKNGDILLLNRQPTLHRPSIQAHRARILPEEKVLRLHYANCKAYNADFDGDEMNAHFPQ |
| | SELGRAEAYVLACTDQQYLVPKDGQPLAGLIQDHMVSGASMTTRGCFFTREHYMELVYRG |
| | LTDKVGRVKLLSPSILKPFPLWTGKQVVSTLLINIIPEDHIPLNLSGKAKITGKAWVKET |
| | PRSVPGFNPDSMCESQVIIREGELLCGVLDKAHYGSSAYGLVHCCYEIYGGETSGKVLTC |
| | LARLFTAYLQLYRGFTLGVEDILVKPKADVKRQRIIEESTHCGPQAVRAALNLPEAASYD |
| | EVRGKWQDAHLGKDQRDFNMIDLKFKEEVNHYSNEINKACMPFGLHRQFPENSLQMMVQS |
| | GAKGSTVNTMQISCLLGQIELEGRRPPLMASGKSLPCFEPYEFTPRAGGFVTGRFLTGIK |
| | PPEFFFHCMAGREGLVDTAVKTSRSGYLQRCIIKHLEGLVVQYDLTVRDSDGSVVQFLYG |
| | EDGLDIPKTQFLQPKQFPFLASNYEVIMKSQHLHEVLSRADPKKALHHFRAIKKWQSKHP |
| | NTLLRRGAFLSYSQKIQEAVKALKLESENRNGRSPGTQEMLRMWYELDEESRRKYQKKAA |
| | ACPDPSLSVWRPDIYFASVSETFETKVDDYSQEWAAQTEKSYEKSELSLDRLRTLLQLKW |
| | QRSLCEPGEAVGLLAAQSIGEPSTQMTLNTFHFAGRGEMNVTLGIPRLREILMVASANIK |
| | TPMMSVPVLNTKKALKRVKSLKKQLTRVCLGEVLQKIDVQESFCMEEKQNKFQVYQLRFQ |
| | FLPHAYYQQEKCLRPEDILRFMETRFFKLLMESIKKKNNKASAFRNVNTRRATQRDLDNA |
| | GELGRSRGEQEGDEEEEGHIVDAEAEEGDADASDAKRKEKQEEEVDYESEEEEEREGEEN |
| | DDEDMQEERNPHREGARKTQEQDEEVGLGTEEDPSLPALLTQPRKPTHSQEPQGPEAMER |
| | RVQAVREIHPFIDDYQYDTEESLWCQVTVKLPLMKINFDMSSLVVSLAHGAVIYATKGIT |
| | RCLLNETTNNKNEKELVLNTEGINLPELFKYAEVLDLRRLYSNDIHAIANTYGIEAALRV |
| | IEKEIKDVFAVYGIAVDPRHLSLVADYMCFEGVYKPLNRFGIRSNSSPLQQMTFETSFQF |
| | LKQATMLGSHDELRSPSACLVVGKVVRGGTGLFELKQPLR |
| RPA2 | >sp\|P15927\|RFA2_HUMAN Replication protein A 32 kDa subunit |
| | OS = Homo sapiens GN = RPA2 PE = 1 SV = 1 (SEQ ID NO: 319) |
| | MWNSGFESYGSSSYGGAGGYTQSPGGFGSPAPSQAEKKSRARAQHIVPCTISQLLSATLV |
| | DEVFRIGNVEISQVTIVGIIRHAEKAPTNIVYKIDDMTAAPMDVRQWVDTDDTSSENTVV |
| | PPETYVKVAGHLRSFQNKKSLVAFKIMPLEDMNEFTTHILEVINAHMVLSKANSQPSAGR |
| | APISNPGMSEAGNFGGNSFMPANGLTVAQNQVLNLIKACPRPEGLNFQDLKNQLKHMSVS |
| | SIKQAVDFLSNEGHIYSTVDDDHFKSTDAE |
| | >sp\|P15927-2\|RFA2_HUMAN Isoform 2 of Replication protein A 32 kDa |
| | subunit OS = Homo sapiens GN = RPA2 (SEQ ID NO: 320) |
| | MGRGDRNKRSIRGFESYGSSSYGGAGGYTQSPGGFGSPAPSQAEKKSRARAQHIVPCTIS |
| | QLLSATLVDEVFRIGNVEISQVTIVGIIRHAEKAPTNIVYKIDDMTAAPMDVRQWVDTDD |
| | TSSENTVVPPETYVKVAGHLRSFQNKKSLVAFKIMPLEDMNEFTTHILEVINAHMVLSKA |
| | NSQPSAGRAPISNPGMSEAGNFGGNSFMPANGLTVAQNQVLNLIKACPRPEGLNFQDLKN |
| | QLKHMSVSSIKQAVDFLSNEGHIYSTVDDDHFKSTDAE |
| | >sp\|P15927-3\|RFA2_HUMAN Isoform 3 of Replication protein A 32 kDa |
| | subunit OS = Homo sapiens GN = RPA2 (SEQ ID NO: 321) |
| | MWNSNDGGAGWRRKRIAGGFSKRASLGSERRVVAGEEGRERSWGVWGSPAGRRRGRLGRL |
| | GQCLKGRSLREPAGFSEAWDVAQALILLFKTGGFESYGSSSYGGAGGYTQSPGGFGSPAP |
| | SQAEKKSRARAQHIVPCTISQLLSATLVDEVFRIGNVEISQVTIVGIIRHAEKAPTNIVY |
| | KIDDMTAAPMDVRQWVDTDDTSSENTVVPPETYVKVAGHLRSFQNKKSLVAFKIMPLEDM |
| | NEFTTHILEVINAHMVLSKANSQPSAGRAPISNPGMSEAGNFGGNSFMPANGLTVAQNQV |
| | LNLIKACPRPEGLNFQDLKNQLKHMSVSSIKQAVDFLSNEGHIYSTVDDDHFKSTDAE |
| RPA3 | See Table VI.2 |
| RAD52 | >sp\|P43351\|RAD52_HUMAN DNA repair protein RAD52 homolog OS = Homo |
| | sapiens GN = RAD52 PE = 1 SV = 1 (SEQ ID NO: 322) |
| | MSGTEEAILGGRDSHPAAGGGSVLCFGQCQYTAEEYQAIQKALRQRLGPEYISSRMAGGG |
| | QKVCYIEGHRVINLANEMFGYNGWAHSITQQNVDFVDLNNGKFYVGVCAFVRVQLKDGSY |
| | HEDVGYGVSEGLKSKALSLEKARKEAVTDGLKRALRSFGNALGNCILDKDYLRSLNKLPR |
| | QLPLEVDLTKAKRQDLEPSVEEARYNSCRPNMALGHPQLQQVTSPSRPSHAVIPADQDCS |
| | SRSLSSSAVESEATHQRKLRQKQLQQQFRERMEKQQVRVSTPSAEKSEAAPPAPPVTHST |
| | PVTVSEPLLEKDFLAGVTQELIKTLEDNSEKWAVTPDAGDGVVKPSSRADPAQTSDTLAL |
| | NNQMVTQNRTPHSVCHQKPQAKSGSWDLQTYSADQRTTGNWESHRKSQDMKKRKYDPS |
| | >sp\|P43351-2\|RAD52_HUMAN Isoform beta of DNA repair protein RAD52 |
| | homolog OS = Homo sapiens GN = RAD52 (SEQ ID NO: 323) |
| | MSGTEEAILGGRDSHPAAGGGSVLCFGQCQYTAEEYQAIQKALRQRLGPEYISSRMAGGG |
| | QKVCYIEGHRVINLANEMFGYNGWAHSITQQNVDFVDLNNGKFYVGVCAFVRVQLKDGSY |
| | HEDVGYGVSEGLKSKALSLEKARKEAVTDGLKRALRLPLLGVSGRILYSLFSVHSVMCAG |
| | GLPTPTASAQTAPSSPCSSAVLRYAQEFWECTWKLYSGQRLPEITK |
| | >sp\|P43351-3\|RAD52_HUMAN Isoform gamma of DNA repair protein |
| | RAD52 homolog OS = Homo sapiens GN = RAD52 (SEQ ID NO: 324) |
| | MSGTEEAILGGRDSHPAAGGGSVLCFGQCQYTAEEYQAIQKALRQRLGPEYISSRMAGGG |
| | QKVCYIEGHRVINLANEMFGYNGWAHSITQQNVDFVDLNNGKFYVGVCAFVRVQLKVRGW |
| | SRPAARKDQWVVGEGWFIS |
| | >sp\|P43351-4\|RAD52_HUMAN Isoform delta of DNA repair protein |
| | RAD52 homolog OS = Homo sapiens GN = RAD52 (SEQ ID NO: 325) |
| | MSGTEEAILGGRDSHPAAGGGSVLCFGQCQYTAEEYQAIQKALRQRLGPEYISSRMAGGG |
| | QKVCYIEGHRVINLANEMFGYNGWAHSITQQNVGEYALQQWGLLHCPAPAESLLWVRR |
| XPF | See Table VI.9 |
| ERCC1 | See Table VI.9 |
| a ligase | — |

[1372] More specifically, in some embodiments, the SSA down-regulator is an siRNA targeting Rad51, an siRNA targeting ERCC1, or an agent of Table VI.12 or any combination thereof. Inhibitors of some of the proteins of Table VI.11 above are also listed elsewhere in this specification.

TABLE VI.12
Down-regulators of SSA.
1. Rad52

| | |
|---|---|
| Compounds | Rad52 inhibitor deposited as PubChemAID: 651668 |
| siRNA | RAD52 Silencer, sold by Life Technologies; |
| | Accell Human RAD52 siRNA, sold by Dharmacon; |
| | Commercially available from Dharmacon or Ambion |
| antibodies | RAD52 antibody (C-term), sold by Abgent; |
| | RAD52 antibody, sold by Novus Biologicals |

2. ERCC1

| Compound | Reference |
|---|---|
| NSC 130813 | Jordheim et al (2013) MOL. PHARMACOL 84(1): 12-24. |
| siRNAs | ERCC1 excision repair cross-complementation group 1 |
| | siRNA, sold by Dharmacon; |
| | ERCC1 Silencer, sold by Life Technologies; |
| | Commercially available from Dharmacon or Ambion |
| antibodies | ERCC1 Antibody #3885, sold by Cell Signaling |
| | Technology; |
| | ERCC1 Antibody (8F1), sold by Novus Biologicals |

3. XPF

| Compounds | Reference |
|---|---|
| NSC 130813 | Jordheim et al (2013) MOL. PHARMACOL. 84(1): 12-24. |
| siRNAs | Commercially available from Dharmacon or Ambion |

### VI.6 Single Strand Break Repair (SSBR)

[1373] Single-strand breaks (SSBs) in the genome are repaired by the SSBR pathway, which is a distinct mechanism from the DSB repair mechanisms discussed above (see FIG. 16). “SSBR”, as used herein, refers to a DNA repair process that has four major stages: SSB detection, DNA end processing, DNA gap filling, and DNA ligation (see, e.g., Caldecott (2008) NAT. REV. GENET. 9: 619-31). A brief summary of SSBR is provided below.

[1374] In the first stage, when a SSB forms, PARP1 and/or PARP2 recognize the break and recruit the repair machinery. The binding and activity of PARP1 at DNA breaks is transient and appears to accelerate SSBR by promoting the focal accumulation or stability of SSBR protein complexes at the lesion. Arguably the most important of these SSBR proteins is XRCC1, which functions as a molecular scaffold that interacts with, stabilizes, and stimulates multiple enzymatic components of the SSBRr process including the protein responsible for processing the DNA 3′ and 5′ ends. For instance, XRCC1 interacts with several proteins (DNA polymerase beta, PNK, and three nucleases, APE1, APTX, and APLF) that promote end processing. APE1 has endonuclease activity. APLF has endonuclease and 3′ to 5′ exonuclease activities. APTX has endonuclease and 3′ to 5′ exonuclease activity. This end processing is an important stage of SSBR since the 3′- and/or 5′-termini of most, if not all, SSBs are “damaged”. End processing generally involves restoring a damaged 3′ end to a hydroxylated state and/or restoring a damaged 5′ end to a phosphate moiety, thereby producing ligation-competent ends. Enzymes that process damaged 3′ termini include PNKP, APE1, and TDP1. Enzymes that process damaged 5′ termini include PNKP, DNA polymerase beta (Pol beta), and APTX. LIG3 (DNA ligase III) can also participate in end processing. Once the ends are cleaned, gap filling can occur.

[1375] At the DNA gap filling stage, the proteins typically present are PARP1, DNA polymerase beta, XRCC1, FEN1 (flap endonuclease 1), DNA polymerase delta/epsilon, PCNA, and LIG1. There are potentially two processes by which DNA gap filling occurs: short patch repair and long patch repair. Short patch repair involves the insertion of a single missing nucleotide. At some SSBs, gap filling might include displacing two or more nucleotides (displacement of up to 12 bases has been reported). FEN1 is an endonuclease that removes the displaced 5′-residues. Multiple DNA polymerases, including DNA polymerase beta, are involved in the repair of SSBs. The type of DNA polymerase that is recruited is dependent on the source and type of SSB.

[1376] In the fourth stage, a DNA ligase such as LIG1 (Ligase I) or LIG3 (Ligase III) catalyzes joining of the ends. Short patch repair uses Ligase III, while long patch repair uses Ligase I.

[1377] Sometimes, SSBR is coupled with replication, and may involve one or more of CtIP, MRN, ERCC1, and FEN1. SSBR is often cell-cycle dependent (see FIG. 16).

[1378] In some embodiments, HDR is promoted by down-regulating the SSBR pathway. For example, in some embodiments, a Cas9 molecule, e.g., a nickase, and a gRNA can induce a nick in a desired location during G1 or another phase of the cell cycle. A nick that is unrepaired in G1 will be converted into a DSB in S/G2 when a replication fork passes through the nicked area. In G2, the HDR machinery is active and can engage the break. Thus, an SSBR down-regulator can increase the likelihood that a break is repaired by HDR. A SSBR down-regulator can also increase the likelihood that a nick in G2 is repaired by HDR by preventing the cell from engaging the SSBR machinery during G2.

[1379] Accordingly, in some embodiments, the methods described herein involve down-regulating SSBR in order to promote HDR. For instance, the methods may involve modulating, e.g., inhibiting, a component (e.g., exactly one component, or one or more components, e.g., two or three components) of the SSBR pathway, e.g., a component of Table VI.13 or VI.1(F). More specifically, the methods may involve modulating, e.g., inhibiting, exactly one of, or one or more of a PARP, PARP1, PARP2, XRCC1, DNA polymerase beta (Pol beta), DNA polymerase delta, DNA polymerase epsilon, PCNA, LIG1, PNK, PNKP, APE1, APTX, APLF, TDP1, LIG3, FEN1, CtIP, MRN, and ERCC1. Up-regulation of HDR, in some embodiments, is achieved using siRNA directed against one or more of the components listed in Table VI.13 or VI.1(F). In some embodiments, a SSBR pathway is down regulated using an HDR-enhancing gRNA that targets a component of a SSBR pathway, e.g., one or more of the components listed in Table VI.13 or VI.1(F) (e.g., a PARP, PARP1, PARP2, XRCC1, DNA polymerase beta (Pol beta), DNA polymerase delta, DNA polymerase epsilon, PCNA, LIG1, PNK, PNKP, APE1, APTX, APLF, TDP1, LIG3, FEN1, CtIP, MRN, and ERCC1). In some embodiments, the HDR-enhancing gRNA is used in combination with an eiCas9 molecule. In some embodiments, the HDR-enhancing gRNA is used in combination with an eaCas9 molecule. In some embodiments, the HDR-enhancing gRNA is administered to the cell as a HDR-enhancing gRNA:Cas9 molecule complex.

[1380] In embodiments, one or more of HDR, alt-HR, anti-HR, NHEJ, MMEJ, SSA, MMR, NER, and BER are not substantially down-regulated, e.g., the only DNA damage repair pathway to be substantially down-regulated is the SSBR pathway.

TABLE VI.13
Factors that promote SSBR

| | |
|---|---|
| a PARP | — |
| PARP1 | See Table VI.2 |
| PARP2 | See Table VI.2 |
| PARG | >sp\|Q86W56\|PARG_HUMAN Poly(ADP-ribose) glycohydrolase OS = Homo sapiens |
| | GN = PARG PE = 1 SV = 1 (SEQ ID NO: 326) |
| | MNAGPGCEPCTKRPRWGAATTSPAASDARSFPSRQRRVLDPKDAHVQFRVPPSSPACVPG |
| | RAGQHRGSATSLVFKQKTITSWMDTKGIKTAESESLDSKENNNTRIESMMSSVQKDNFYQ |
| | HNVEKLENVSQLSLDKSPTEKSTQYLNQHQTAAMCKWQNEGKHTEQLLESEPQTVTLVPE |
| | QFSNANIDRSPQNDDHSDTDSEENRDNQQFLTTVKLANAKQTTEDEQAREAKSHQKCSKS |
| | CDPGEDCASCQQDEIDVVPESPLSDVGSEDVGTGPKNDNKLTRQESCLGNSPPFEKESEP |
| | ESPMDVDNSKNSCQDSEADEETSPGFDEQEDGSSSQTANKPSRFQARDADIEFRKRYSTK |
| | GGEVRLHFQFEGGESRTGMNDLNAKLPGNISSLNVECRNSKQHGKKDSKITDHFMRLPKA |
| | EDRRKEQWETKHQRTERKIPKYVPPHLSPDKKWLGTPIEEMRRMPRCGIRLPLLRPSANH |
| | TVTIRVDLLRAGEVPKPFPTHYKDLWDNKHVKMPCSEQNLYPVEDENGERTAGSRWELIQ |
| | TALLNKFTRPQNLKDAILKYNVAYSKKWDFTALIDFWDKVLEEAEAQHLYQSILPDMVKI |
| | ALCLPNICTQPIPLLKQKMNHSITMSQEQIASLLANAFFCTFPRRNAKMKSEYSSYPDIN |
| | FNRLFEGRSSRKPEKLKTLFCYFRRVTEKKPTGLVTFTRQSLEDFPEWERCEKPLTRLHV |
| | TYEGTIEENGQGMLQVDFANRFVGGGVTSAGLVQEEIRFLINPELIISRLFTEVLDHNEC |
| | LIITGTEQYSEYTGYAETYRWSRSHEDGSERDDWQRRCTEIVAIDALHFRRYLDQFVPEK |
| | MRRELNKAYCGFLRPGVSSENLSAVATGNWGCGAFGGDARLKALIQILAAAAAERDVVYF |
| | TFGDSELMRDIYSMHIFLTERKLTVGDVYKLLLRYYNEECRNCSTPGPDIKLYPFIYHAV |
| | ESCAETADHSGQRTGT |
| | >sp\|Q86W56-2\|PARG_HUMAN Isoform 2 of Poly(ADP-ribose) glycohydrolase |
| | OS = Homo sapiens GN = PARG (SEQ ID NO: 327) |
| | MDTKGIKTAESESLDSKENNNTRIESMMSSVQKDNFYQHNVEKLENVSQLSLDKSPTEKS |
| | TQYLNQHQTAAMCKWQNEGKHTEQLLESEPQTVTLVPEQFSNANIDRSPQNDDHSDTDSE |
| | ENRDNQQFLTTVKLANAKQTTEDEQAREAKSHQKCSKSCDPGEDCASCQQDEIDVVPESP |
| | LSDVGSEDVGTGPKNDNKLTRQESCLGNSPPFEKESEPESPMDVDNSKNSCQDSEADEET |
| | SPGFDEQEDGSSSQTANKPSRFQARDADIEFRKRYSTKGGEVRLHFQFEGGESRTGMNDL |
| | NAKLPGNISSLNVECRNSKQHGKKDSKITDHFMRLPKAEDRRKEQWETKHQRTERKIPKY |
| | VPPHLSPDKKWLGTPIEEMRRMPRCGIRLPLLRPSANHTVTIRVDLLRAGEVPKPFPTHY |
| | KDLWDNKHVKMPCSEQNLYPVEDENGERTAGSRWELIQTALLNKFTRPQNLKDAILKYNV |
| | AYSKKWDFTALIDFWDKVLEEAEAQHLYQSILPDMVKIALCLPNICTQPIPLLKQKMNHS |
| | ITMSQEQIASLLANAFFCTFPRRNAKMKSEYSSYPDINFNRLFEGRSSRKPEKLKTLFCY |
| | FRRVTEKKPTGLVTFTRQSLEDFPEWERCEKPLTRLHVTYEGTIEENGQGMLQVDFANRF |
| | VGGGVTSAGLVQEEIRFLINPELIISRLFTEVLDHNECLIITGTEQYSEYTGYAETYRWS |
| | RSHEDGSERDDWQRRCTEIVAIDALHFRRYLDQFVPEKMRRELNKAYCGFLRPGVSSENL |
| | SAVATGNWGCGAFGGDARLKALIQILAAAAAERDVVYFTFGDSELMRDIYSMHIFLTERK |
| | LTVGDVYKLLLRYYNEECRNCSTPGPDIKLYPFIYHAVESCAETADHSGQRTGT |
| | >sp\|Q86W56-3\|PARG_HUMAN Isoform 3 of Poly(ADP-ribose) glycohydrolase |
| | OS = Homo sapiens GN = PARG (SEQ ID NO: 328) |
| | MMSSVQKDNFYQHNVEKLENVSQLSLDKSPTEKSTQYLNQHQTAAMCKWQNEGKHTEQLL |
| | ESEPQTVTLVPEQFSNANIDRSPQNDDHSDTDSEENRDNQQFLTTVKLANAKQTTEDEQA |
| | REAKSHQKCSKSCDPGEDCASCQQDEIDVVPESPLSDVGSEDVGTGPKNDNKLTRQESCL |
| | GNSPPFEKESEPESPMDVDNSKNSCQDSEADEETSPGFDEQEDGSSSQTANKPSRFQARD |
| | ADIEFRKRYSTKGGEVRLHFQFEGGESRTGMNDLNAKLPGNISSLNVECRNSKQHGKKDS |
| | KITDHFMRLPKAEDRRKEQWETKHQRTERKIPKYVPPHLSPDKKWLGTPIEEMRRMPRCG |
| | IRLPLLRPSANHTVTIRVDLLRAGEVPKPFPTHYKDLWDNKHVKMPCSEQNLYPVEDENG |
| | ERTAGSRWELIQTALLNKFTRPQNLKDAILKYNVAYSKKWDFTALIDFWDKVLEEAEAQH |
| | LYQSILPDMVKIALCLPNICTQPIPLLKQKMNHSITMSQEQIASLLANAFFCTFPRRNAK |
| | MKSEYSSYPDINFNRLFEGRSSRKPEKLKTLFCYFRRVTEKKPTGLVTFTRQSLEDFPEW |
| | ERCEKPLTRLHVTYEGTIEENGQGMLQVDFANRFVGGGVTSAGLVQEEIRFLINPELIIS |
| | RLFTEVLDHNECLIITGTEQYSEYTGYAETYRWSRSHEDGSERDDWQRRCTEIVAIDALH |
| | FRRYLDQFVPEKMRRELNKAYCGFLRPGVSSENLSAVATGNWGCGAFGGDARLKALIQIL |
| | AAAAAERDVVYFTFGDSELMRDIYSMHIFLTERKLTVGDVYKLLLRYYNEECRNCSTPGP |
| | DIKLYPFIYHAVESCAETADHSGQRTGT |
| | >sp\|Q86W56-4\|PARG_HUMAN Isoform 4 of Poly(ADP-ribose) glycohydrolase |
| | OS = Homo sapiens GN = PARG (SEQ ID NO: 329) |
| | MVQAGAEKDAQSISLRKEQWETKHQRTERKIPKYVPPHLSPDKKWLGTPIEEMRRMPRCG |
| | IRLPLLRPSANHTVTIWNGERTAGSRWELIQTALLNKFTRPQNLKDAILKYNVAYSKKWD |
| | FTALIDFWDKVLEEAEAQHLYQSILPDMVKIALCLPNICTQPIPLLKQKMNHSITMSQEQ |
| | IASLLANAFFCTFPRRNAKMKSEYSSYPDINFNRLFEGRSSRKPEKLKTLFCYFRRVTEK |
| | KPTGLVTFTRQSLEDFPEWERCEKPLTRLHVTYEGTIEENGQGMLQVDFANRFVGGGVTS |
| | AGLVQEEIRFLINPELIISRLFTEVLDHNECLIITGTEQYSEYTGYAETYRWSRSHEDGS |
| | ERDDWQRRCTEIVAIDALHFRRYLDQFVPEKMRRELNKAYCGFLRPGVSSENLSAVATGN |
| | WGCGAFGGDARLKALIQILAAAAAERDVVYFTFGDSELMRDIYSMHIFLTERKLTVGDVY |
| | KLLLRYYNEECRNCSTPGPDIKLYPFIYHAVESCAETADHSGQRTGT |
| | >sp\|Q86W56-5\|PARG_HUMAN Isoform 5 of Poly(ADP-ribose) glycohydrolase |
| | OS = Homo sapiens GN = PARG (SEQ ID NO: 330) |
| | MRRMPRCGIRLPLLRPSANHTVTIWNGERTAGSRWELIQTALLNKFTRPQNLKDAILKYN |
| | VAYSKKWDFTALIDFWDKVLEEAEAQHLYQSILPDMVKIALCLPNICTQPIPLLKQKMNH |
| | SITMSQEQIASLLANAFFCTFPRRNAKMKSEYSSYPDINFNRLFEGRSSRKPEKLKTLFC |
| | YFRRVTEKKPTGLVTFTRQSLEDFPEWERCEKPLTRLHVTYEGTIEENGQGMLQVDFANR |
| | FVGGGVTSAGLVQEEIRFLINPELIISRLFTEVLDHNECLIITGTEQYSEYTGYAETYRW |
| | SRSHEDGSERDDWQRRCTEIVAIDALHFRRYLDQFVPEKMRRELNKAYCGFLRPGVSSEN |
| | LSAVATGNWGCGAFGGDARLKALIQILAAAAAERDVVYFTFGDSELMRDIYSMHIFLTER |
| | KLTVGDVYKLLLRYYNEECRNCSTPGPDIKLYPFIYHAVESCAETADHSGQRTGT |
| XRCC1 | See Table VI.9 |
| DNA polymerase | MSLRSGGRRRADPGADGEASRDDGATSSVSALKRLERSQWTDKMDLRFGFERLKEPGEKTGWLINMHPTE |
| beta | ILDEDKRLGSAVDYYFIQDDGSRFKVALPYKPYFYIATRKGCEREVSSFLSKKFQGKIAKVETVPKEDLD |
| | LPNHLVGLKRNYIRLSFHTVEDLVKVRKEISPAVKKNREQDHASDAYTALLSSVLQRGGVITDEEETSKK |
| | IADQLDNIVDMREYDVPYHIRLSIDLKIHVAHWYNVRYRGNAFPVEITRRDDLVERPDPVVLAFDIETTK |
| | LPLKFPDAETDQIMMISYMIDGQGYLITNREIVSEDIEDFEFTPKPEYEGPFCVFNEPDEAHLIQRWFEH |
| | VQETKPTIMVTYNGDFFDWPFVEARAAVHGLSMQQEIGFQKDSQGEYKAPQCIHMDCLRWVKRDSYLPVG |
| | SHNLKAAAKAKLGYDPVELDPEDMCRMATEQPQTLATYSVSDAVATYYLYMKYVHPFIFALCTIIPMEPD |
| | EVLRKGSGTLCEALLMVQAFHANIIFPNKQEQEFNKLTDDGHVLDSETYVGGHVEALESGVFRSDIPCRF |
| | RMNPAAFDFLLQRVEKTLRHALEEEEKVPVEQVTNFEEVCDEIKSKLASLKDVPSRIECPLIYHLDVGAM |
| | YPNIILTNRLQPSAMVDEATCAACDFNKPGANCQRKMAWQWRGEFMPASRSEYHRIQHQLESEKFPPLFP |
| | EGPARAFHELSREEQAKYEKRRLADYCRKAYKKIHITKVEERLTTICQRENSFYVDTVRAFRDRRYEFKG |
| | LHKVWKKKLSAAVEVGDAAEVKRCKNMEVLYDSLQLAHKCILNSFYGYVMRKGARWYSMEMAGIVCFTGA |
| | NIITQARELIEQIGRPLELDTDGIWCVLPNSFPENFVFKTTNVKKPKVTISYPGAMLNIMVKEGFTNDQY |
| | QELAEPSSLTYVTRSENSIFFEVDGPYLAMILPASKEEGKKLKKRYAVFNEDGSLAELKGFEVKRRGELQ |
| | LIKIFQSSVFEAFLKGSTLEEVYGSVAKVADYWLDVLYSKAANMPDSELFELISENRSMSRKLEDYGEQK |
| | STSISTAKRLAEFLGDQMVKDAGLSCRYIISRKPEGSPVTERAIPLAIFQAEPTVRKHFLRKWLKSSSLQ |
| | DFDIRAILDWDYYIERLGSAIQKIITIPAALQQVKNPVPRVKHPDWLHKKLLEKNDVYKQKKISELFTLE |
| | GRRQVTMAEASEDSPRPSAPDMEDFGLVKLPHPAAPVTVKRKRVLWESQEESQDLTPTVPWQEILGQPPA |
| | LGTSQEEWLVWLRFHKKKWQLQARQRLARRKRQRLESAEGVLRPGAIRDGPATGLGSFLRRTARSILDLP |
| | WQIVQISETSQAGLFRLWALVGSDLHCIRLSIPRVFYVNQRVAKAEEGASYRKVNRVLPRSNMVYNLYEY |
| | SVPEDMYQEHINEINAELSAPDIEGVYETQVPLLFRALVHLGCVCVVNKQLVRHLSGWEAETFALEHLEM |
| | RSLAQFSYLEPGSIRHIYLYHHAQAHKALFGIFIPSQRRASVFVLDTVRSNQMPSLGALYSAEHGLLLEK |
| | VGPELLPPPKHTFEVRAETDLKTICRAIQRFLLAYKEERRGPTLIAVQSSWELKRLASEIPVLEEFPLVP |
| | ICVADKINYGVLDWQRHGARRMIRHYLNLDTCLSQAFEMSRYFHIPIGNLPEDISTFGSDLFFARHLQRH |
| | NHLLWLSPTARPDLGGKEADDNCLVMEFDDQATVEINSSGCYSTVCVELDLQNLAVNTILQSHHVNDMEG |
| | ADSMGISFDVIQQASLEDMITGGQAASAPASYDETALCSNTFRILKSMVVGWVKEITQYHNIYADNQVMH |
| | FYRWLRSPSSLLHDPALHRTLHNMMKKLFLQLIAEFKRLGSSVIYANFNRIILCTKKRRVEDAIAYVEYI |
| | TSSIHSKETFHSLTISFSRCWEFLLWMDPSNYGGIKGKVSSRIHCGLQDSQKAGGAEDEQENEDDEEERD |
| | GEEEEEAEESNVEDLLENNWNILQFLPQAASCQNYFLMIVSAYIVAVYHCMKDGLRRSAPGSTPVRRRGA |
| | SQLSQEAEGAVGALPGMITFSQDYVANELTQSFFTITQKIQKKVTGSRNSTELSEMFPVLPGSHLLLNNP |
| | ALEFIKYVCKVLSLDTNITNQVNKLNRDLLRLVDVGEFSEEAQFRDPCRSYVLPEVICRSCNFCRDLDLC |
| | KDSSFSEDGAVLPQWLCSNCQAPYDSSAIEMTLVEVLQKKLMAFTLQDLVCLKCRGVKETSMPVYCSCAG |
| | DFALTIHTQVFMEQIGIFRNIAQHYGMSYLLETLEWLLQKNPQLGH (SEQ ID NO: 331) |
| DNA polymerase | MFSEQAAQRAHTLLSPPSANNATFARVPVATYTNSSQPFRLGERSFSRQYAHIYATRLIQMRPFLENRAQ |
| delta | QHWGSGVGVKKLCELQPEEKCCVVGTLFKAMPLQPSILREVSEEHNLLPQPPRSKYIHPDDELVLEDELQ |
| | RIKLKGTIDVSKLVTGTVLAVFGSVRDDGKFLVEDYCFADLAPQKPAPPLDTDRFVLLVSGLGLGGGGGE |
| | SLLGTQLLVDVVTGQLGDEGEQCSAAHVSRVILAGNLLSHSTQSRDSINKAKYLTKKTQAASVEAVKMLD |
| | EILLQLSASVPVDVMPGEFDPTNYTLPQQPLHPCMFPLATAYSTLQLVTNPYQATIDGVRFLGTSGQNVS |
| | DIFRYSSMEDHLEILEWTLRVRHISPTAPDTLGCYPFYKTDPFIFPECPHVYFCGNTPSFGSKIIRGPED |
| | QTVLLVTVPDFSATQTACLVNLRSLACQPISFSGFGAEDDDLGGLGLGP (Pol delta2, |
| | sequence 1) (SEQ ID NO: 332) |
| | MGGAGARGLAGCGAPRVNLLGLGEAVWTKQVRSVAMFSEQAAQRAHTLLSPPSANNATFARVPVATYTNS |
| | SQPFRLGERSFSRQYAHIYATRLIQMRPFLENRAQQHWGSGVGVKKLCELQPEEKCCVVGTLFKAMPLQP |
| | SILREVSEEHNLLPQPPRSKYIHPDDELVLEDELQRIKLKGTIDVSKLVTGTVLAVFGSVRDDGKFLVED |
| | YCFADLAPQKPAPPLDTDRFVLLVSGLGLGGGGGESLLGTQLLVDVVTGQLGDEGEQCSAAHVSRVILAG |
| | NLLSHSTQSRDSINKAKYLTKKTQAASVEAVKMLDEILLQLSASVPVDVMPGEFDPTNYTLPQQPLHPCM |
| | FPLATAYSTLQLVTNPYQATIDGVRFLGTSGQNVSDIFRYSSMEDHLEILEWTLRVRHISPTAPDTLGCY |
| | PFYKTDPFIFPECPHVYFCGNTPSFGSKIIRGPEDQTVLLVTVPDFSATQTACLVNLRSLACQPISFSGF |
| | GAEDDDLGGLGLGP (Pol delta2, sequence 2) (SEQ ID NO: 333) |
| | MADQLYLENIDEFVTDQNKIVTYKWLSYTLGVHVNQAKQMLYDYVERKRKENSGAQLHVTYLVSGSLIQN |
| | GHSCHKVAVVREDKLEAVKSKLAVTASIHVYSIQKAMLKDSGPLFNTDYDILKSNLQNCSKFSAIQCAAA |
| | VPRAPAESSSSSKKFEQSHLHMSSETQANNELTTNGHGPPASKQVSQQPKGIMGMFASKAAAKTQETNKE |
| | TKTEAKEVTNASAAGNKAPGKGNMMSNFFGKAAMNKFKVNLDSEQAVKEEKIVEQPTVSVTEPKLATPAG |
| | LKKSSKKAEPVKVLQKEKKRGKRVALSDDETKETENMRKKRRRIKLPESDSSEDEVFPDSPGAYEAESPS |
| | PPPPPSPPLEPVPKTEPEPPSVKSSSGENKRKRKRVLKSKTYLDGEGCIVTEKVYESESCTDSEEELNMK |
| | TSSVHRPPAMTVKKEPREERKGPKKGTAALGKANRQVSITGFFQRK (Pol delta3) |
| | (SEQ ID NO: 334) |
| DNA polymerase | MSLRSGGRRRADPGADGEASRDDGATSSVSALKRLERSQWTDKMDLRFGFERLKEPGEKTGWLINMHPTE |
| epsilon | ILDEDKRLGSAVDYYFIQDDGSRFKVALPYKPYFYIATRKGCEREVSSFLSKKFQGKIAKVETVPKEDLD |
| | LPNHLVGLKRNYIRLSFHTVEDLVKVRKEISPAVKKNREQDHASDAYTALLSSVLQRGGVITDEEETSKK |
| | IADQLDNIVDMREYDVPYHIRLSIDLKIHVAHWYNVRYRGNAFPVEITRRDDLVERPDPVVLAFDIETTK |
| | LPLKFPDAETDQIMMISYMIDGQGYLITNREIVSEDIEDFEFTPKPEYEGPFCVFNEPDEAHLIQRWFEH |
| | VQETKPTIMVTYNGDFFDWPFVEARAAVHGLSMQQEIGFQKDSQGEYKAPQCIHMDCLRWVKRDSYLPVG |
| | SHNLKAAAKAKLGYDPVELDPEDMCRMATEQPQTLATYSVSDAVATYYLYMKYVHPFIFALCTIIPMEPD |
| | EVLRKGSGTLCEALLMVQAFHANIIFPNKQEQEFNKLTDDGHVLDSETYVGGHVEALESGVFRSDIPCRF |
| | RMNPAAFDFLLQRVEKTLRHALEEEEKVPVEQVTNFEEVCDEIKSKLASLKDVPSRIECPLIYHLDVGAM |
| | YPNIILTNRLQPSAMVDEATCAACDFNKPGANCQRKMAWQWRGEFMPASRSEYHRIQHQLESEKFPPLFP |
| | EGPARAFHELSREEQAKYEKRRLADYCRKAYKKIHITKVEERLTTICQRENSFYVDTVRAFRDRRYEFKG |
| | LHKVWKKKLSAAVEVGDAAEVKRCKNMEVLYDSLQLAHKCILNSFYGYVMRKGARWYSMEMAGIVCFTGA |
| | NIITQARELIEQIGRPLELDTDGIWCVLPNSFPENFVFKTTNVKKPKVTISYPGAMLNIMVKEGFTNDQY |
| | QELAEPSSLTYVTRSENSIFFEVDGPYLAMILPASKEEGKKLKKRYAVFNEDGSLAELKGFEVKRRGELQ |
| | LIKIFQSSVFEAFLKGSTLEEVYGSVAKVADYWLDVLYSKAANMPDSELFELISENRSMSRKLEDYGEQK |
| | STSISTAKRLAEFLGDQMVKDAGLSCRYIISRKPEGSPVTERAIPLAIFQAEPTVRKHFLRKWLKSSSLQ |
| | DFDIRAILDWDYYIERLGSAIQKIITIPAALQQVKNPVPRVKHPDWLHKKLLEKNDVYKQKKISELFTLE |
| | GRRQVTMAEASEDSPRPSAPDMEDFGLVKLPHPAAPVTVKRKRVLWESQEESQDLTPTVPWQEILGQPPA |
| | LGTSQEEWLVWLRFHKKKWQLQARQRLARRKRQRLESAEGVLRPGAIRDGPATGLGSFLRRTARSILDLP |
| | WQIVQISETSQAGLFRLWALVGSDLHCIRLSIPRVFYVNQRVAKAEEGASYRKVNRVLPRSNMVYNLYEY |
| | SVPEDMYQEHINEINAELSAPDIEGVYETQVPLLFRALVHLGCVCVVNKQLVRHLSGWEAETFALEHLEM |
| | RSLAQFSYLEPGSIRHIYLYHHAQAHKALFGIFIPSQRRASVFVLDTVRSNQMPSLGALYSAEHGLLLEK |
| | VGPELLPPPKHTFEVRAETDLKTICRAIQRFLLAYKEERRGPTLIAVQSSWELKRLASEIPVLEEFPLVP |
| | ICVADKINYGVLDWQRHGARRMIRHYLNLDTCLSQAFEMSRYFHIPIGNLPEDISTFGSDLFFARHLQRH |
| | NHLLWLSPTARPDLGGKEADDNCLVMEFDDQATVEINSSGCYSTVCVELDLQNLAVNTILQSHHVNDMEG |
| | ADSMGISFDVIQQASLEDMITGGQAASAPASYDETALCSNTFRILKSMVVGWVKEITQYHNIYADNQVMH |
| | FYRWLRSPSSLLHDPALHRTLHNMMKKLFLQLIAEFKRLGSSVIYANFNRIILCTKKRRVEDAIAYVEYI |
| | TSSIHSKETFHSLTISFSRCWEFLLWMDPSNYGGIKGKVSSRIHCGLQDSQKAGGAEDEQENEDDEEERD |
| | GEEEEEAEESNVEDLLENNWNILQFLPQAASCQNYFLMIVSAYIVAVYHCMKDGLRRSAPGSTPVRRRGA |
| | SQLSQEAEGAVGALPGMITFSQDYVANELTQSFFTITQKIQKKVTGSRNSTELSEMFPVLPGSHLLLNNP |
| | ALEFIKYVCKVLSLDTNITNQVNKLNRDLLRLVDVGEFSEEAQFRDPCRSYVLPEVICRSCNFCRDLDLC |
| | KDSSFSEDGAVLPQWLCSNCQAPYDSSAIEMTLVEVLQKKLMAFTLQDLVCLKCRGVKETSMPVYCSCAG |
| | DFALTIHTQVFMEQIGIFRNIAQHYGMSYLLETLEWLLQKNPQLGH (SEQ ID NO: 335) |
| PCNA | >sp\|P12004\|PCNA_HUMAN Proliferating cell nuclear antigen OS = Homo |
| | sapiens GN = PCNA PE = 1 SV = 1 |
| | MFEARLVQGSILKKVLEALKDLINEACWDISSSGVNLQSMDSSHVSLVQLTLRSEGFDTY |
| | RCDRNLAMGVNLTSMSKILKCAGNEDIITLRAEDNADTLALVFEAPNQEKVSDYEMKLMD |
| | LDVEQLGIPEQEYSCVVKMPSGEFARICRDLSHIGDAVVISCAKDGVKFSASGELGNGNI |
| | KLSQTSNVDKEEEAVTIEMNEPVQLTFALRYLNFFTKATPLSSTVTLSMSADVPLVVEYK |
| | IADMGHLKYYLAPKIEDEEGS (SEQ ID NO: 336 ) |
| LIG1 | See Table VI.9 |
| PNK | See Table VI.7 |
| APE1 | MPKRGKKGAVAEDGDELRTEPEAKKSKTAAKKNDKEAAGEGPALYEDPPDQKTSPSGKPA |
| | TLKICSWNVDGLRAWIKKKGLDWVKEEAPDILCLQETKCSENKLPAELQELPGLSHQYWS |
| | APSDKEGYSGVGLLSRQCPLKVSYGIGDEEHDQEGRVIVAEFDSFVLVTAYVPNAGRGLV |
| | RLEYRQRWDEAFRKFLKGLASRKPLVLCGDLNVAHEEIDLRNPKGNKKNAGFTPQERQGF |
| | GELLQAVPLADSFRHLYPNTPYAYTFWTYMMNARSKNVGWRLDYFLLSHSLLPALCDSKI |
| | RSKALGSDHCPITLYLAL (APE-1 CCDS 9550.1) (SEQ ID NO: 337) |
| APTX | MMRVCWLVRQDSRHQRIRLPHLEAVVIGRGPETKITDKKCSRQQVQLKAECNKGYVKVKQ |
| | VGVNPTSIDSVVIGKDQEVKLQPGQVLHMVNELYPYIVEFEEEAKNPGLETHRKRKRSGN |
| | SDSIERDAAQEAEAGTGLEPGSNSGQCSVPLKKGKDAPIKKESLGHWSQGLKISMQDPKM |
| | QVYKDEQVVVIKDKYPKARYHWLVLPWTSISSLKAVAREHLELLKHMHTVGEKVIVDFAG |
| | SSKLRFRLGYHAIPSMSHVHLHVISQDFDSPCLKNKKHWNSFNTEYFLESQAVIEMVQEA |
| | GRVTVRDGMPELLKLPLRCHECQQLLPSIPQLKEHLRKHWTQ (APTX Isoform 1 |
| | CCDS 47956.1) (SEQ ID NO: 338) |
| | MSNVNLSVSDFWRVMMRVCWLVRQDSRHQRIRLPHLEAVVIGRGPETKITDKKCSRQQEF |
| | EEEAKNPGLETHRKRKRSGNSDSIERDAAQEAEAGTGLEPGSNSGQCSVPLKKGKDAPIK |
| | KESLGHWSQGLKISMQDPKMQVYKDEQVVVIKDKYPKARYHWLVLPWTSISSLKAVAREH |
| | LELLKHMHTVGEKVIVDFAGSSKLRFRLGYHAIPSMSHVHLHVISQDFDSPCLKNKKHWN |
| | SFNTEYFLESQAVIEMVQEAGRVTVRDGMPELLKLPLRCHECQQLLPSIPQLKEHLRKHW |
| | TQ (APTX Isoform 2 CCDS 56568.1) (SEQ ID NO: 340) |
| | MMRVCWLVRQDSRHQRIRLPHLEAVVIGRGPETKITDKKCSRQQEFEEEAKNPGLETHRK |
| | RKRSGNSDSIERDAAQEAEAGTGLEPGSNSGQCSVPLKKGKDAPIKKESLGHWSQGLKIS |
| | MQDPKMQVYKDEQVVVIKDKYPKARYHWLVLPWTSISSLKAVAREHLELLKHMHTVGEKV |
| | IVDFAGSSKLRFRLGYHAIPSMSHVHLHVISQDFDSPCLKNKKHWNSFNTEYFLESQAVI |
| | EMVQEAGRVTVRDGMPELLKLPLRCHECQQLLPSIPQLKEHLRKHWTQ (APTX |
| | Isoform 3 CCDS 75827.1) (SEQ ID NO: 342) |
| APLF | MSGGFELQPRDGGPRVALAPGETVIGRGPLLGITDKRVSRRHAILEVAGGQLRIKPIHTN |
| | PCFYQSSEKSQLLPLKPNLWCYLNPGDSFSLLVDKYIFRILSIPSEVEMQCTLRNSQVLD |
| | EDNILNETPKSPVINLPHETTGASQLEGSTEIAKTQMTPTNSVSFLGENRDCNKQQPILA |
| | ERKRILPTWMLAEHLSDQNLSVPAISGGNVIQGSGKEEICKDKSQLNTTQQGRRQLISSG |
| | SSENTSAEQDTGEECKNTDQEESTISSKEMPQSFSAITLSNTEMNNIKTNAQRNKLPIEE |
| | LGKVSKHKIATKRTPHKEDEAMSCSENCSSAQGDSLQDESQGSHSESSSNPSNPETLHAK |
| | ATDSVLQGSEGNKVKRTSCMYGANCYRKNPVHFQHFSHPGDSDYGGVQIVGQDETDDRPE |
| | CPYGPSCYRKNPQHKIEYRHNTLPVRNVLDEDNDNVGQPNEYDLNDSFLDDEEEDYEPTD |
| | EDSDWEPGKEDEEKEDVEELLKEAKRFMKRK (APLF CCDS 1888.1) |
| | (SEQ ID NO: 343) |
| TDP1 | >tr\|Q9BRS7\|Q9BRS7_HUMAN TDP1 protein OS = Homo sapiens GN = TDP1 |
| | PE = 1 SV = 1 (SEQ ID NO: 347) |
| | MSQEGDYGRWTISSSDESEEEKPKPDKPSTSSLLCARQGAANEPRYTCSEAQKAAHKRKI |
| | SPVKFSNTDSVLPPKRQKSGSQEDLGWCLSSSDDELQPEMPQKQAEKVVIKKEKDISAPN |
| | DGTAQRTENHGAPACHRLKEEEDEYETSGEGQDIWDMLDKGNPFQFYLTRVSGVKPKYNS |
| | GALHIKDILSPLFGTLVSSAQFNYCFDVDWLVKQYPPEFRKKPILLVHGDKREAKAHLHA |
| | QAKPYENISLCQAKLDIAFGTHHTKMMLLLYEEGLRVVIHTSNLIHADWHQKTQGTHL |
| LIG3 | See Table VI.9 |
| FEN1 | See Table VI.2 |
| CtIP | See Table VI.2 |
| MRN | — |
| ERCC1 | See Table VI.9 |

[1381] More specifically, in some embodiments, the SSBR down-regulator is an inhibitor of a PARP such as AZD2281 (also called Olaparib and KU-0059436) or niraparib (produced by Tesero), BMN6′73 (produced by BioMarin Pharmaceutical), or rucaparib (produced by Clovis Oncology), an siRNA targeting XRCC1, or an agent Table VI.14, or any combination thereof. Inhibitors of some of the proteins of Table VI.13 above are also listed elsewhere in this specification.

TABLE VI.14
Down-regulators of SSBR

| | |
|---|---|
| Compounds | Phase |

1. PARP

| | |
|---|---|
| Olaparib (also known as AZD2281 and | Phase III |
| KU-0059436) | |
| Iniparib (also known as BSI-201) | Phase III |
| BMN 673 | Phase III |
| Rucaparib (also known as AG014699 and | Phase II |
| PF-01367338) | |
| Veliparib (also known as ABT-888) | Phase II |
| CEP 9722 | Phase II |
| INO-1001 | Phase I/II |
| MK 4827 | Phase I |
| BGB-290 | Phase I |
| E701 (also known as GPI21016) | Phase I |
| MP-124 | Phase I |
| LT-673 | Preclinical |
| NMS-P118 | Preclinical |
| XAV939 | Preclinical |
| 3-aminobenzamide | Preclinical (highly |
| | selective against PARP-5) |

PARP1 siRNAs
Accell Human PARP1 siRNA, sold by Dharmacon
PARP1 Silencer, sold by Life Technologies
PARP1 antibodies
PARP1 antibody, sold by Proteintech Group Inc.
PARP1 monoclonal antibody (M01), clone 3G4, sold by Abnova
PARP2 siRNAs
PARP2 Silencer, sold by Life Technologies
Accell Human PARP2 siRNA, sold by Dharmacon
PARP2 antibodies
Anti-PARP-2, clone 4G8 antibody, sold by EMD Millipore
PARP2 Antibody, sold by ProSci
2. XRCC1
siRNA
XRCC1 Silencer, sold by Life Technologies
Accell Human XRCC1 siRNA, sold by Dharmacon
Commercially available siRNAs from Dharmacon or Ambion
antibodies
Anti-XRCC1 antibody, sold by Boster
XRCC1 mouse monoclonal antibody, clone 2D8, sold by
OriGene Technologies

### VI.7 Mismatch Repair (MMR)

[1382] Cells contain three excision repair pathways: MMR, BER, and NER. The excision repair pathways have a common feature in that they typically recognize a lesion on one strand of the DNA, then exo/endonucleases remove the lesion and leave a 1-30 nucleotide gap that is subsequentially filled-in by DNA polymerase, and finally sealed by a ligase (see, e.g., Li (2008) CELL RESEARCH 18(1): 85-98). A brief description of the MMR is provided below.

[1383] Mismatch repair (MMR) operates on mispaired DNA bases. The MSH2/6 or MSH2/3 complexes both have ATPase activities that play an important role in mismatch recognition and the initiation of repair. MSH2/6 preferentially recognizes base-base mismatches and identifies mispairs of 1 or 2 nucleotides, while MSH2/3 preferentially recognizes larger insertion/deletion (ID) mispairs.

[1384] hMLH1 heterodimerizes with hPMS2 to form hMutLa, which possesses an ATPase activity, and is important for multiple steps of MMR. It possesses a PCNA/replication factor C (RFC)-dependent endonuclease activity which plays an important role in 3′ nick-directed MMR involving EXO1. (EXO1 is a participant in both HDR and MMR.) It regulates termination of mismatch-provoked excision. Ligase I is the relevant ligase for this pathway.

[1385] In some embodiments, the methods herein include down-regulating the MMR pathway in order to increase the frequency of successful genome editing. While not wishing to be bound by theory, MMR down-regulation could operate through the following mechanism. In some arrangements, genome editing will lead to a mismatch between the old and the new strand. Because MMR typically utilizes the original strand as the template, and therefore has a bias towards reverting back to the original sequence, down-regulation of MMR should enhance gene correction.

[1386] Accordingly, in some embodiments, the methods herein involve down-regulating the MMR pathway in order to promote HDR (e.g., HR, alt-HR or SSA). For instance, in some embodiments, the methods may involve modulating, e.g., inhibiting, a component (e.g., exactly one component, or one or more components, e.g., two or three components) of the MMR pathway, e.g., a component of Table VI.15 or VI.1(H). More specifically, in some embodiments, the methods may involve modulating, e.g., inhibiting, exactly one of, or one or more of EX01, MSH2, MSH3, MSH6, MLH1, PMS2, MLH3, DNA Polymerase delta, RPA, HMGB1, RFC, and DNA ligase I. Up-regulation of HDR, in some embodiments, is achieved using siRNA directed against one or more of the components listed in Table VI.15 or VI.1(H). In some embodiments, a MMR pathway is down regulated using an HDR-enhancing gRNA that targets a component of a MMR pathway, e.g., one or more of the components listed in Table VI.15 or VI.1(H) (e.g., one or more of EXO1, MSH2, MSH3, MSH6, MLH1, PMS2, MLH3, DNA Polymerase delta, RPA, HMGB1, RFC, and DNA ligase I). In some embodiments, the HDR-enhancing gRNA is used in combination with an eiCas9 molecule. In some embodiments, the HDR-enhancing gRNA is used in combination with an eaCas9 molecule. In some embodiments, the HDR-enhancing gRNA is administered to the cell as a HDR-enhancing gRNA:Cas9 molecule complex.

[1387] In some embodiments, one or more of HDR, alt-HR, anti-HR, NHEJ, MMEJ, SSA, SSBR, NER, and BER are not substantially down-regulated, e.g., in some embodiments the only DNA damage repair pathway to be substantially down-regulated is the MMR pathway.

TABLE VI.15
Factors involved in MMR.

| Factor | Sequence |
|---|---|
| EXO1 | See Table VI.2 |
| MSH2 | >sp\|P43246\|MSH2_HUMAN DNA mismatch repair protein Msh2 OS = Homo |
| | sapiens GN = MSH2 PE = 1 SV = 1 (SEQ ID NO: 348) |
| | MAVQPKETLQLESAAEVGFVRFFQGMPEKPTTTVRLFDRGDFYTAHGEDALLAAREVFKT |
| | QGVIKYMGPAGAKNLQSVVLSKMNFESFVKDLLLVRQYRVEVYKNRAGNKASKENDWYLA |
| | YKASPGNLSQFEDILFGNNDMSASIGVVGVKMSAVDGQRQVGVGYVDSIQRKLGLCEFPD |
| | NDQFSNLEALLIQIGPKECVLPGGETAGDMGKLRQIIQRGGILITERKKADFSTKDIYQD |
| | LNRLLKGKKGEQMNSAVLPEMENQVAVSSLSAVIKFLELLSDDSNFGQFELTTFDFSQYM |
| | KLDIAAVRALNLFQGSVEDTTGSQSLAALLNKCKTPQGQRLVNQWIKQPLMDKNRIEERL |
| | NLVEAFVEDAELRQTLQEDLLRRFPDLNRLAKKFQRQAANLQDCYRLYQGINQLPNVIQA |
| | LEKHEGKHQKLLLAVFVTPLTDLRSDFSKFQEMIETTLDMDQVENHEFLVKPSFDPNLSE |
| | LREIMNDLEKKMQSTLISAARDLGLDPGKQIKLDSSAQFGYYFRVTCKEEKVLRNNKNFS |
| | TVDIQKNGVKFTNSKLTSLNEEYTKNKTEYEEAQDAIVKEIVNISSGYVEPMQTLNDVLA |
| | QLDAVVSFAHVSNGAPVPYVRPAILEKGQGRIILKASRHACVEVQDEIAFIPNDVYFEKD |
| | KQMFHIITGPNMGGKSTYIRQTGVIVLMAQIGCFVPCESAEVSIVDCILARVGAGDSQLK |
| | GVSTFMAEMLETASILRSATKDSLIIIDELGRGTSTYDGFGLAWAISEYIATKIGAFCMF |
| | ATHFHELTALANQIPTVNNLHVTALTTEETLTMLYQVKKGVCDQSFGIHVAELANFPKHV |
| | IECAKQKALELEEFQYIGESQGYDIMEPAAKKCYLEREQGEKIIQEFLSKVKQMPFTEMS |
| | EENITIKLKQLKAEVIAKNNSFVNEIISRIKVTT |
| | >sp\|P43246-2\|MSH2_HUMAN Isoform 2 of DNA mismatch repair protein |
| | Msh2 OS = Homo sapiens GN = MSH2 (SEQ ID NO: 349) |
| | MGPAGAKNLQSVVLSKMNFESFVKDLLLVRQYRVEVYKNRAGNKASKENDWYLAYKASPG |
| | NLSQFEDILFGNNDMSASIGVVGVKMSAVDGQRQVGVGYVDSIQRKLGLCEFPDNDQFSN |
| | LEALLIQIGPKECVLPGGETAGDMGKLRQIIQRGGILITERKKADFSTKDIYQDLNRLLK |
| | GKKGEQMNSAVLPEMENQVAVSSLSAVIKFLELLSDDSNFGQFELTTFDFSQYMKLDIAA |
| | VRALNLFQGSVEDTTGSQSLAALLNKCKTPQGQRLVNQWIKQPLMDKNRIEERLNLVEAF |
| | VEDAELRQTLQEDLLRRFPDLNRLAKKFQRQAANLQDCYRLYQGINQLPNVIQALEKHEG |
| | KHQKLLLAVFVTPLTDLRSDFSKFQEMIETTLDMDQVENHEFLVKPSFDPNLSELREIMN |
| | DLEKKMQSTLISAARDLGLDPGKQIKLDSSAQFGYYFRVTCKEEKVLRNNKNFSTVDIQK |
| | NGVKFTNSKLTSLNEEYTKNKTEYEEAQDAIVKEIVNISSGYVEPMQTLNDVLAQLDAVV |
| | SFAHVSNGAPVPYVRPAILEKGQGRIILKASRHACVEVQDEIAFIPNDVYFEKDKQMFHI |
| | ITGPNMGGKSTYIRQTGVIVLMAQIGCFVPCESAEVSIVDCILARVGAGDSQLKGVSTFM |
| | AEMLETASILRSATKDSLIIIDELGRGTSTYDGFGLAWAISEYIATKIGAFCMFATHFHE |
| | LTALANQIPTVNNLHVTALTTEETLTMLYQVKKGVCDQSFGIHVAELANFPKHVIECAKQ |
| | KALELEEFQYIGESQGYDIMEPAAKKCYLEREQGEKIIQEFLSKVKQMPFTEMSEENITI |
| | KLKQLKAEVIAKNNSFVNEIISRIKVTT |
| MSH3 | >sp\|P20585\|MSH3_HUMAN DNA mismatch repair protein Msh3 OS = Homo |
| | sapiens GN = MSH3 PE = 1 SV = 4 (SEQ ID NO: 350) |
| | MSRRKPASGGLAASSSAPARQAVLSRFFQSTGSLKSTSSSTGAADQVDPGAAAAAAAAAA |
| | AAPPAPPAPAFPPQLPPHIATEIDRRKKRPLENDGPVKKKVKKVQQKEGGSDLGMSGNSE |
| | PKKCLRTRNVSKSLEKLKEFCCDSALPQSRVQTESLQERFAVLPKCTDFDDISLLHAKNA |
| | VSSEDSKRQINQKDTTLFDLSQFGSSNTSHENLQKTASKSANKRSKSIYTPLELQYIEMK |
| | QQHKDAVLCVECGYKYRFFGEDAEIAARELNIYCHLDHNFMTASIPTHRLFVHVRRLVAK |
| | GYKVGVVKQTETAALKAIGDNRSSLFSRKLTALYTKSTLIGEDVNPLIKLDDAVNVDEIM |
| | TDTSTSYLLCISENKENVRDKKKGNIFIGIVGVQPATGEVVFDSFQDSASRSELETRMSS |
| | LQPVELLLPSALSEQTEALIHRATSVSVQDDRIRVERMDNIYFEYSHAFQAVTEFYAKDT |
| | VDIKGSQIISGIVNLEKPVICSLAAIIKYLKEFNLEKMLSKPENFKQLSSKMEFMTINGT |
| | TLRNLEILQNQTDMKTKGSLLWVLDHTKTSFGRRKLKKWVTQPLLKLREINARLDAVSEV |
| | LHSESSVFGQIENHLRKLPDIERGLCSIYHKKCSTQEFFLIVKTLYHLKSEFQAIIPAVN |
| | SHIQSDLLRTVILEIPELLSPVEHYLKILNEQAAKVGDKTELFKDLSDFPLIKKRKDEIQ |
| | GVIDEIRMHLQEIRKILKNPSAQYVTVSGQEFMIEIKNSAVSCIPTDWVKVGSTKAVSRF |
| | HSPFIVENYRHLNQLREQLVLDCSAEWLDFLEKFSEHYHSLCKAVHHLATVDCIFSLAKV |
| | AKQGDYCRPTVQEERKIVIKNGRHPVIDVLLGEQDQYVPNNTDLSEDSERVMIITGPNMG |
| | GKSSYIKQVALITIMAQIGSYVPAEEATIGIVDGIFTRMGAADNIYKGQSTFMEELTDTA |
| | EIIRKATSQSLVILDELGRGTSTHDGIAIAYATLEYFIRDVKSLTLFVTHYPPVCELEKN |
| | YSHQVGNYHMGFLVSEDESKLDPGAAEQVPDFVTFLYQIIRGIAARSYGLNVAKLADVPG |
| | EILKKAAHKSKELEGLINTKRKRLKYFAKLWIMHNAQDLQKWTEEFNMEETQTSLLH |
| MSH6 | >sp\|P52701\|MSH6_HUMAN DNA mismatch repair protein Msh6 OS = Homo |
| | sapiens GN = MSH6 PE = 1 SV = 2 (SEQ ID NO: 351) |
| | MSRQSTLYSFFPKSPALSDANKASARASREGGRAAAAPGASPSPGGDAAWSEAGPGPRPL |
| | ARSASPPKAKNLNGGLRRSVAPAAPTSCDFSPGDLVWAKMEGYPWWPCLVYNHPFDGIFI |
| | REKGKSVRVHVQFFDDSPIRGWVSKRLLKPYIGSKSKEAQKGGHFYSAKPEILRAMQRAD |
| | EALNKDKIKRLELAVCDEPSEPEEEEEMEVGTTYVTDKSEEDNEIESEEEVQPKTQGSRR |
| | SSRQIKKRRVISDSESDIGGSDVEFKPDTKEEGSSDEISSGVGDSESEGLNSPVKVARKR |
| | KRMVIGNGSLKRKSSRKETPSATKQATSISSETKNTLRAFSAPQNSESQAHVSGGGDDSS |
| | RPTVWYHETLEWLKEEKRRDEHRRRPDHPDFDASTLYVPEDFLNSCIPGMRKWWQIKSQN |
| | FDLVICYKVGKFYELYHMDALIGVSELGLVFMKGNWAHSGFPEIAFGRYSDSLVQKGYKV |
| | ARVEQTETPERMEARCRKMAHISKYDRVVRREICRIITKGTQTYSVLEGDPSENYSKYLL |
| | SLKEKEEDSSGHTRAYGVCFVDTSLGKFFIGQFSDDRHCSRFRILVAHYPPVQVLFEKGN |
| | LSKETKTILKSSLSCSLQEGLIPGSQFWDASKTLRILLEEEYFREKLSDGIGVMLPQVLK |
| | GMTSESDSIGLIPGEKSELALSALGGCVFYLKKCLIDQELLSMANFEEYIPLDSDIVSTT |
| | RSGAIFTKAYQRMVLDAVILNNLEIFLNGINGSTEGILLERVDTCHTPFGKRLLKQWLCA |
| | PLCNHYAINDRLDAIEDLMVVPDKISEVVELLKKLPDLERLLSKIHNVGSPLKSQNHPDS |
| | RAIMYEETTYSKKKIIDFLSALEGFKVMCKIIGIMEEVADGFKSKILKQVISLQTKNPEG |
| | RFPDLIVELNRWDTAFDHEKARKTGLITPKAGFDSDYDQALADIRENEQSLLEYLEKQRN |
| | RIGCRTIVYWGIGRNRYQLEIPENFTTRNLPEEYELKSIKKGCKRYWIKTIEKKLANLIN |
| | AEERRDVSLKDCMRRLFYNFDKNYKDWQSAVECIAVLDVLLCLANYSRGGDGPMCRPVIL |
| | LPEDIPPFLELKGSRHPCITKIFFGDDFIPNDILIGCEEEEQENGKAYCVLVTGPNMGGK |
| | STLMRQAGLLAVMAQMGCYVPAEVCRLIPIDRVFIRLGASDRIMSGESTFFVELSETASI |
| | LMHATAHSLVLVDELGRGTATFDGTAIANAVVKELAETIKCRTLFSTHYHSLVEDYSQNV |
| | AVRLGHMACMVENECEDPSQETITFLYKFIKGACPKSYGFNAARLANLPEEVIQKGHRKA |
| | REFEKMNQSLRLFREVCLASERSTVDAEAVHKLLTLIKEL |
| MLH1 | >sp\|P40692\|MLH1_HUMAN DNA mismatch repair protein Mlh1 OS = Homo |
| | sapiens GN = MLH1 PE = 1 SV = 1 (SEQ ID NO: 352) |
| | MSFVAGVIRRLDETVVNRIAAGEVIQRPANAIKEMIENCLDAKSTSIQVIVKEGGLKLIQ |
| | IQDNGTGIRKEDLDIVCERFTTSKLQSFEDLASISTYGFRGEALASISHVAHVTITTKTA |
| | DGKCAYRASYSDGKLKAPPKPCAGNQGTQIIVEDLEYNIATRRKALKNPSEEYGKILEVV |
| | GRYSVHNAGISFSVKKQGETVADVRTLPNASTVDNIRSIFGNAVSRELIEIGCEDKILAF |
| | KMNGYISNANYSVKKCIFLLFINHRLVESTSLRKAIETVYAAYLPKNTHPFLYLSLEISP |
| | QNVDVNVHPIKHEVHFLHEESILERVQQHIESKLLGSNSSRMYFTQTLLPGLAGPSGEMV |
| | KSTISLISSSTSGSSDKVYAHQMVRIDSREQKLDAFLQPLSKPLSSQPQAIVIEDKIDIS |
| | SGRARQQDEEMLELPAPAEVAAKNQSLEGDTTKGTSEMSEKRGPTSSNPRKRHREDSDVE |
| | MVEDDSRKEMTAACTPRRRIINLTSVLSLQEEINEQGHEVLREMLHNHSFVGCVNPQWAL |
| | AQHQTKLYLLNITKLSEELFYQILIYDFANFGVLRLSEPAPLFDLAMLALDSPESGWTEE |
| | DGPKEGLAEYIVEFLKKKAEMLADYFSLEIDEEGNLIGLPLLIDNYVPPLEGLPIFILRL |
| | ATEVNWDEEKECFESLSKECAMFYSIRKQYISEESTLSGQQSEVPGSIPNSWKWIVEHIV |
| | YKALRSHILPPKHFTEDGNILQLANLPDLYKVFERC |
| | >sp\|P40692-2\|MLH1_HUMAN Isoform 2 of DNA mismatch repair protein |
| | Mlh1 OS = Homo sapiens GN = MLH1 (SEQ ID NO: 353) |
| | MNGYISNANYSVKKCIFLLFINHRLVESTSLRKAIETVYAAYLPKNTHPFLYLSLEISPQ |
| | NVDVNVHPTKHEVHFLHEESILERVQQHIESKLLGSNSSRMYFTQTLLPGLAGPSGEMVK |
| | STTSLTSSSTSGSSDKVYAHQMVRTDSREQKLDAFLQPLSKPLSSQPQAIVTEDKTDISS |
| | GRARQQDEEMLELPAPAEVAAKNQSLEGDTTKGTSEMSEKRGPTSSNPRKRHREDSDVEM |
| | VEDDSRKEMTAACTPRRRIINLTSVLSLQEEINEQGHEVLREMLHNHSFVGCVNPQWALA |
| | QHQTKLYLLNTTKLSEELFYQILIYDFANFGVLRLSEPAPLFDLAMLALDSPESGWTEED |
| | GPKEGLAEYIVEFLKKKAEMLADYFSLEIDEEGNLIGLPLLIDNYVPPLEGLPIFILRLA |
| | TEVNWDEEKECFESLSKECAMFYSIRKQYISEESTLSGQQSEVPGSIPNSWKWTVEHIVY |
| | KALRSHILPPKHFTEDGNILQLANLPDLYKVFERC |
| | >sp\|P40692-3\|MLH1_HUMAN Isoform 3 of DNA mismatch repair protein |
| | Mlh1 OS = Homo sapiens GN = MLH1 (SEQ ID NO: 354) |
| | MAFEALASISHVAHVTITTKTADGKCAYRASYSDGKLKAPPKPCAGNQGTQITVEDLFYN |
| | IATRRKALKNPSEEYGKILEVVGRYSVHNAGISFSVKKQGETVADVRTLPNASTVDNIRS |
| | IFGNAVSRELIEIGCEDKTLAFKMNGYISNANYSVKKCIFLLFINHRLVESTSLRKAIET |
| | VYAAYLPKNTHPFLYLSLEISPQNVDVNVHPTKHEVHFLHEESILERVQQHIESKLLGSN |
| | SSRMYFTQILLPGLAGPSGEMVKSTISLTSSSTSGSSDKVYAHQMVRIDSREQKLDAFLQ |
| | PLSKPLSSQPQAIVTEDKTDISSGRARQQDEEMLELPAPAEVAAKNQSLEGDTTKGTSEM |
| | SEKRGPTSSNPRKRHREDSDVEMVEDDSRKEMTAACTPRRRIINLTSVLSLQEEINEQGH |
| | EVLREMLHNHSFVGCVNPQWALAQHQTKLYLLNTTKLSEELFYQILIYDFANFGVLRLSE |
| | PAPLFDLAMLALDSPESGWTEEDGPKEGLAEYIVEFLKKKAEMLADYFSLEIDEEGNLIG |
| | LPLLIDNYVPPLEGLPIFILRLATEVNWDEEKECFESLSKECAMFYSIRKQYISEESTLS |
| | GQQSEVPGSIPNSWKWTVEHIVYKALRSHILPPKHFTEDGNILQLANLPDLYKVFERC |
| PMS2 | >sp\|P54278\|PMS2_HUMAN Mismatch repair endonuclease PMS2 OS = Homo |
| | sapiens GN = PMS2 PE = 1 SV = 2 (SEQ ID NO: 355) |
| | MERAESSSTEPAKAIKPIDRKSVHQICSGQVVLSLSTAVKELVENSLDAGATNIDLKLKD |
| | YGVDLIEVSDNGCGVEEENFEGLTLKHHTSKIQEFADLTQVETFGFRGEALSSLCALSDV |
| | TISTCHASAKVGTRLMFDHNGKIIQKTPYPRPRGTTVSVQQLFSTLPVRHKEFQRNIKKE |
| | YAKMVQVLHAYCIISAGIRVSCINQLGQGKRQPVVCIGGSPSIKENIGSVFGQKQLQSLI |
| | PFVQLPPSDSVCEEYGLSCSDALHNLFYISGFISQCTHGVGRSSTDRQFFFINRRPCDPA |
| | KVCRLVNEVYHMYNRHQYPFVVLNISVDSECVDINVTPDKRQILLQEEKLLLAVLKTSLI |
| | GMFDSDVNKLNVSQQPLLDVEGNLIKMHAADLEKPMVEKQDQSPSLRTGEEKKDVSISRL |
| | REAFSLRHTTENKPHSPKTPEPRRSPLGQKRGMLSSSTSGAISDKGVLRPQKEAVSSSHG |
| | PSDPTDRAEVEKDSGHGSTSVDSEGFSIPDTGSHCSSEYAASSPGDRGSQEHVDSQEKAP |
| | KTDDSFSDVDCHSNQEDTGCKFRVLPQPTNLATPNTKRFKKEEILSSSDICQKLVNTQDM |
| | SASQVDVAVKINKKVVPLDFSMSSLAKRIKQLHHEAQQSEGEQNYRKFRAKICPGENQAA |
| | EDELRKEISKTMFAEMETIGQFNLGFIITKLNEDIFIVDQHATDEKYNFEMLQQHTVLQG |
| | QRLIAPQTLNLTAVNEAVLIENLEIFRKNGFDEVIDENAPVTERAKLISLPTSKNWTFGP |
| | QDVDELIFMLSDSPGVMCRPSRVKQMFASRACRKSVMIGTALNTSEMKKLITHMGEMDHP |
| | WNCPHGRPTMRHIANLGVISQN |
| | >sp\|P54278-2\|PMS2_HUMAN Isoform 2 of Mismatch repair endonuclease |
| | PMS2 OS = Homo sapiens GN = PMS2 (SEQ ID NO: 356) |
| | MERAESSSTEPAKAIKPIDRKSVHQICSGQVVLSLSTAVKELVENSLDAGATNIDLKLKD |
| | YGVDLIEVSDNGCGVEEENFEGLTLKHHTSKIQEFADLTQVETFGFRGEALSSLCALSDV |
| | TISTCHASAKVGTRLMFDHNGKIIQKTPYPRPRGTTVSVQQLFSTLPVRHKEFQRNIKKE |
| | YAKMVQVLHAYCIISAGIRVSCINQLGQGKRQPVVCIGGSPSIKENIGSVFGQKQLQSLI |
| | PFVQLPPSDSVCEEYGLSCSDALHNLFYKTMFAEMETIGQFNLGFIITKLNEDIFIVDQH |
| | ATDEKYNFEMLQQHTVLQGQRLIAPQTLNLTAVNEAVLIENLEIFRKNGFDEVIDENAPV |
| | TERAKLISLPTSKNWTFGPQDVDELIFMLSDSPGVMCRPSRVKQMFASRACRKSVMIGTA |
| | LNTSEMKKLITHMGEMDHPWNCPHGRPTMRHIANLGVISQN |
| | >sp\|P54278-3\|PMS2_HUMAN Isoform 3 of Mismatch repair endonuclease |
| | PMS2 OS = Homo sapiens GN = PMS2 (SEQ ID NO: 357) |
| | MERAESSSTEPAKAIKPIDRKSVHQICSGQVVLSLSTAVKELVENSLDAGATNIDLKLKD |
| | YGVDLIEVSDNGCGVEEENFEGLTLKHHTSKIQEFADLTQVETFGFRGEALSSLCALSDV |
| | TISTCHASAKVGTRLMFDHNGKIIQKTPYPRPRGTTVSVQQLFSTLPVRHKEFQRNIKKE |
| | YAKMVQVLHAYCIISAGIRVSCINQLGQGKRQPVVCIGGSPSIKENIGSVFGQKQLQSLI |
| | PFVQLPPSDSVCEEYGLSCSDALHNLFYISGFISQCTHGVGRSSTDRQFFFINRRPCDPA |
| | KVCRLVNEVYHMYNRHQYPFVVLNISVDSECVDINVTPDKRQILLQEEKLLLAVLKTSLI |
| | GMFDSDVNKLNVSQQPLLDVEGNLIKMHAADLEKPMVEKQDQSPSLRTGEEKKDVSISRL |
| | REAFSLRHTTENKPHSPKTPEPRRSPLGQKRGMLSSSTSGAISDKGVLRPQKEAVSSSHG |
| | PSDPTDRAEVEKDSGHGSTSVDSEGFSIPDTGSHCSSEYAASSPGDRGSQEHVDSQEKAP |
| | KTDDSFSDVDCHSNQEDTGLKTGPSDPRTSMN |
| | >sp\|P54278-4\|PMS2_HUMAN Isoform 4 of Mismatch repair endonuclease |
| | PMS2 OS = Homo sapiens GN = PMS2 (SEQ ID NO: 358) |
| | MERAESSSTEPAKAIKPIDRKSVHQICSGQVVLSLSTAVKELVENSLDAGATNIDLKLKD |
| | YGVDLIEVSDNGCGVEEENFEGLTLKHHTSKIQEFADLTQVETFGFRGEALSSLCALSDV |
| | TISTCHASAKVGTRLMFDHNGKIIQKTPYPRPRGTTVSVQQLFSTLPVRHKEFQRNIKKQ |
| | ASV |
| MLH3 | >sp\|Q9UHC1\|MLH3_HUMAN DNA mismatch repair protein Mlh3 OS = Homo |
| | sapiens GN = MLH3 PE = 1 SV = 3 (SEQ ID NO: 359) |
| | MIKCLSVEVQAKLRSGLAISSLGQCVEELALNSIDAEAKCVAVRVNMETFQVQVIDNGFG |
| | MGSDDVEKVGNRYFTSKCHSVQDLENPRFYGFRGEALANIADMASAVEISSKKNRTMKTF |
| | VKLFQSGKALKACEADVTRASAGTTVTVYNLFYQLPVRRKCMDPRLEFEKVRQRIEALSL |
| | MHPSISFSLRNDVSGSMVLQLPKTKDVCSRFCQIYGLGKSQKLREISFKYKEFELSGYIS |
| | SEAHYNKNMQFLFVNKRLVLRTKLHKLIDFLLRKESIICKPKNGPTSRQMNSSLRHRSTP |
| | ELYGIYVINVQCQFCEYDVCMEPAKTLIEFQNWDTLLFCIQEGVKMFLKQEKLFVELSGE |
| | DIKEFSEDNGFSLFDATLQKRVTSDERSNFQEACNNILDSYEMFNLQSKAVKRKTTAENV |
| | NTQSSRDSEATRKNTNDAFLYIYESGGPGHSKMTEPSLQNKDSSCSESKMLEQETIVASE |
| | AGENEKHKKSFLEHSSLENPCGTSLEMFLSPFQTPCHFEESGQDLEIWKESTTVNGMAAN |
| | ILKNNRIQNQPKRFKDATEVGCQPLPFATTLWGVHSAQTEKEKKKESSNCGRRNVFSYGR |
| | VKLCSTGFITHVVQNEKTKSTETEHSFKNYVRPGPTRAQETFGNRTRHSVETPDIKDLAS |
| | TLSKESGQLPNKKNCRTNISYGLENEPTATYTMFSAFQEGSKKSQTDCILSDTSPSFPWY |
| | RHVSNDSRKTDKLIGFSKPIVRKKLSLSSQLGSLEKFKRQYGKVENPLDTEVEESNGVTT |
| | NLSLQVEPDILLKDKNRLENSDVCKITTMEHSDSDSSCQPASHILNSEKFPFSKDEDCLE |
| | QQMPSLRESPMTLKELSLFNRKPLDLEKSSESLASKLSRLKGSERETQTMGMMSRFNELP |
| | NSDSSRKDSKLCSVLTQDFCMLFNNKHEKTENGVIPTSDSATQDNSFNKNSKTHSNSNTT |
| | ENCVISETPLVLPYNNSKVTGKDSDVLIRASEQQIGSLDSPSGMLMNPVEDATGDQNGIC |
| | FQSEESKARACSETEESNTCCSDWQRHFDVALGRMVYVNKMTGLSTFIAPTEDIQAACTK |
| | DLTTVAVDVVLENGSQYRCQPFRSDLVLPFLPRARAERTVMRQDNRDTVDDTVSSESLQS |
| | LFSEWDNPVFARYPEVAVDVSSGQAESLAVKIHNILYPYRFTKGMIHSMQVLQQVDNKFI |
| | ACLMSTKTEENGEAGGNLLVLVDQHAAHERIRLEQLIIDSYEKQQAQGSGRKKLLSSTLI |
| | PPLEITVTEEQRRLLWCYHKNLEDLGLEFVFPDTSDSLVLVGKVPLCFVEREANELRRGR |
| | STVTKSIVEEFIREQLELLQTTGGIQGTLPLTVQKVLASQACHGAIKFNDGLSLQESCRL |
| | IEALSSCQLPFQCAHGRPSMLPLADIDHLEQEKQIKPNLTKLRKMAQAWRLFGKAECDTR |
| | QSLQQSMPPCEPP |
| | >sp\|Q9UHC1-2\|MLH3_HUMAN Isoform 2 of DNA mismatch repair protein |
| | Mlh3 OS = Homo sapiens GN = MLH3 (SEQ ID NO: 360) |
| | MIKCLSVEVQAKLRSGLAISSLGQCVEELALNSIDAEAKCVAVRVNMETFQVQVIDNGFG |
| | MGSDDVEKVGNRYFTSKCHSVQDLENPRFYGFRGEALANIADMASAVEISSKKNRTMKTF |
| | VKLFQSGKALKACEADVTRASAGTTVTVYNLFYQLPVRRKCMDPRLEFEKVRQRIEALSL |
| | MHPSISFSLRNDVSGSMVLQLPKTKDVCSRFCQIYGLGKSQKLREISFKYKEFELSGYIS |
| | SEAHYNKNMQFLFVNKRLVLRTKLHKLIDFLLRKESIICKPKNGPTSRQMNSSLRHRSTP |
| | ELYGIYVINVQCQFCEYDVCMEPAKTLIEFQNWDTLLFCIQEGVKMFLKQEKLFVELSGE |
| | DIKEFSEDNGFSLFDATLQKRVTSDERSNFQEACNNILDSYEMFNLQSKAVKRKTTAENV |
| | NTQSSRDSEATRKNTNDAFLYIYESGGPGHSKMTEPSLQNKDSSCSESKMLEQETIVASE |
| | AGENEKHKKSFLEHSSLENPCGTSLEMFLSPFQTPCHFEESGQDLEIWKESTTVNGMAAN |
| | ILKNNRIQNQPKRFKDATEVGCQPLPFATTLWGVHSAQTEKEKKKESSNCGRRNVFSYGR |
| | VKLCSTGFITHVVQNEKTKSTETEHSFKNYVRPGPTRAQETFGNRTRHSVETPDIKDLAS |
| | TLSKESGQLPNKKNCRTNISYGLENEPTATYTMFSAFQEGSKKSQTDCILSDTSPSFPWY |
| | RHVSNDSRKTDKLIGFSKPIVRKKLSLSSQLGSLEKFKRQYGKVENPLDTEVEESNGVTT |
| | NLSLQVEPDILLKDKNRLENSDVCKITTMEHSDSDSSCQPASHILNSEKFPFSKDEDCLE |
| | QQMPSLRESPMTLKELSLFNRKPLDLEKSSESLASKLSRLKGSERETQTMGMMSRFNELP |
| | NSDSSRKDSKLCSVLTQDFCMLFNNKHEKTENGVIPTSDSATQDNSFNKNSKTHSNSNTT |
| | ENCVISETPLVLPYNNSKVTGKDSDVLIRASEQQIGSLDSPSGMLMNPVEDATGDQNGIC |
| | FQSEESKARACSETEESNTCCSDWQRHFDVALGRMVYVNKMTGLSTFIAPTEDIQAACTK |
| | DLTTVAVDVVLENGSQYRCQPFRSDLVLPFLPRARAERTVMRQDNRDTVDDTVSSESLQS |
| | LFSEWDNPVFARYPEVAVDVSSGQAESLAVKIHNILYPYRFTKGMIHSMQVLQQVDNKFI |
| | ACLMSTKTEENGEADSYEKQQAQGSGRKKLLSSTLIPPLEITVTEEQRRLLWCYHKNLED |
| | LGLEFVFPDTSDSLVLVGKVPLCFVEREANELRRGRSTVTKSIVEEFIREQLELLQTTGG |
| | IQGTLPLTVQKVLASQACHGAIKFNDGLSLQESCRLIEALSSCQLPFQCAHGRPSMLPLA |
| | DIDHLEQEKQIKPNLTKLRKMAQAWRLFGKAECDTRQSLQQSMPPCEPP |
| DNA Polymerased | See Table VI.13 |
| elta | |
| RPA | — |
| HMGB1 | >sp\|P09429\|HMGB1_HUMAN High mobility group protein B1 OS = Homo |
| | sapiens GN = HMGB1 PE = 1 SV = 3 (SEQ ID NO: 361) |
| | MGKGDPKKPRGKMSSYAFFVQTCREEHKKKHPDASVNFSEFSKKCSERWKTMSAKEKGKF |
| | EDMAKADKARYEREMKTYIPPKGETKKKFKDPNAPKRPPSAFFLFCSEYRPKIKGEHPGL |
| | SIGDVAKKLGEMWNNTAADDKQPYEKKAAKLKEKYEKDIAAYRAKGKPDAAKKGVVKAEK |
| | SKKKKEEEEDEEDEEDEEEEEDEEDEDEEEDDDDE |
| | >tr\|Q5T7C4\|Q5T7C4_HUMAN High mobility group protein B1 OS = Homo |
| | sapiens GN = HMGB1 PE = 1 SV = 1 (SEQ ID NO: 362) |
| | MGKGDPKKPRGKMSSYAFFVQTCREEHKKKHPDASVNFSEFSKKCSERWKTMSAKEKGKF |
| | EDMAKADKARYEREMKTYIPPKGETKKKFKDPNAPKRPPSAFFLFCSEYRPKIKGEHPGL |
| | SIGDVAKKLGEMWNNTAADDKQPYEKKAAKLKEKYEKF |
| RFC | >sp\|P35251\|RFC1_HUMAN Replication factor C subunit 1 OS = Homo |
| | sapiens GN = RFC1 PE = 1 SV = 4 (SEQ ID NO: 363) |
| | MDIRKFFGVIPSGKKLVSETVKKNEKTKSDEETLKAKKGIKEIKVNSSRKEDDFKQKQPS |
| | KKKRITYDSDSESEETLQVKNAKKPPEKLPVSSKPGKISRQDPVTYISETDEEDDFMCKK |
| | AASKSKENGRSTNSHLGTSNMKKNEENTKTKNKPLSPIKLTPTSVLDYFGTGSVQRSNKK |
| | MVASKRKELSQNTDESGLNDEATAKQLQLDEDAELERQLHEDEEFARTLAMLDEEPKTKK |
| | ARKDTEAGETFSSVQANLSKAEKHKYPHKVKTAQVSDERKSYSPRKQSKYESSKESQQHS |
| | KSSADKIGEVSSPKASSKLAIMKRKEESSYKEIEPVASKRKENAIKLKGETKTPKKTKSS |
| | PAKKESVSPEDSEKKRTNYQAYRSYLNREGPKALGSKEIPKGAENCLEGLIFVITGVLES |
| | IERDEAKSLIERYGGKVTGNVSKKTNYLVMGRDSGQSKSDKAAALGTKIIDEDGLLNLIR |
| | TMPGKKSKYEIAVETEMKKESKLERTPQKNVQGKRKISPSKKESESKKSRPTSKRDSLAK |
| | TIKKETDVFWKSLDFKEQVAEETSGDSKARNLADDSSENKVENLLWVDKYKPTSLKTIIG |
| | QQGDQSCANKLLRWLRNWQKSSSEDKKHAAKFGKFSGKDDGSSFKAALLSGPPGVGKTTT |
| | ASLVCQELGYSYVELNASDTRSKSSLKAIVAESLNNTSIKGFYSNGAASSVSTKHALIMD |
| | EVDGMAGNEDRGGIQELIGLIKHTKIPIICMCNDRNHPKIRSLVHYCFDLRFQRPRVEQI |
| | KGAMMSIAFKEGLKIPPPAMNEHILGANQDIRQVLHNLSMWCARSKALTYDQAKADSHRA |
| | KKDIKMGPFDVARKVFAAGEETAHMSLVDKSDLFFHDYSIAPLFVQENYIHVKPVAAGGD |
| | MKKHLMLLSRAADSICDGDLVDSQIRSKQNWSLLPAQAIYASVLPGELMRGYMTQFPTFP |
| | SWLGKHSSTGKHDRIVQDLALHMSLRTYSSKRTVNMDYLSLLRDALVQPLTSQGVDGVQD |
| | VVALMDTYYLMKEDFENIMEISSWGGKPSPFSKLDPKVKAAFTRAYNKEAHLTPYSLQAI |
| | KASRHSTSPSLDSEYNEELNEDDSQSDEKDQDAIETDAMIKKKTKSSKPSKPEKDKEPRK |
| | GKGKSSKK |
| | >sp\|P35251-2\|RFC1_HUMAN Isoform 2 of Replication factor C subunit |
| | 1 OS = Homo sapiens GN = RFC1 (SEQ ID NO: 364) |
| | MDIRKFFGVIPSGKKLVSETVKKNEKTKSDEETLKAKKGIKEIKVNSSRKEDDFKQKQPS |
| | KKKRIIYDSDSESEETLQVKNAKKPPEKLPVSSKPGKISRQDPVIYISETDEEDDFMCKK |
| | AASKSKENGRSINSHLGTSNMKKNEENTKIKNKPLSPIKLIPTSVLDYFGIGSVQRSNKK |
| | MVASKRKELSQNTDESGLNDEAIAKQLQLDEDAELERQLHEDEEFARTLAMLDEEPKIKK |
| | ARKDTEAGETFSSVQANLSKAEKHKYPHKVKTAQVSDERKSYSPRKQSKYESSKESQQHS |
| | KSSADKIGEVSSPKASSKLAIMKRKEESSYKEIEPVASKRKENAIKLKGETKIPKKIKSS |
| | PAKKESVSPEDSEKKRTNYQAYRSYLNREGPKALGSKEIPKGAENCLEGLIFVITGVLES |
| | IERDEAKSLIERYGGKVIGNVSKKTNYLVMGRDSGQSKSDKAAALGTKIIDEDGLLNLIR |
| | IMPGKKSKYEIAVETEMKKESKLERTPQKNVQGKRKISPSKKESESKKSRPTSKRDSLAK |
| | TIKKETDVFWKSLDFKEQVAEETSGDSKARNLADDSSENKVENLLWVDKYKPISLKTIIG |
| | QQGDQSCANKLLRWLRNWQKSSSEDKKHAKFGKFSGKDDGSSFKAALLSGPPGVGKTTTA |
| | SLVCQELGYSYVELNASDIRSKSSLKAIVAESLNNTSIKGFYSNGAASSVSTKHALIMDE |
| | VDGMAGNEDRGGIQELIGLIKHTKIPIICMCNDRNHPKIRSLVHYCFDLRFQRPRVEQIK |
| | GAMMSIAFKEGLKIPPPAMNEIILGANQDIRQVLHNLSMWCARSKALTYDQAKADSHRAK |
| | KDIKMGPFDVARKVFAAGEETAHMSLVDKSDLFFHDYSIAPLFVQENYIHVKPVAAGGDM |
| | KKHLMLLSRAADSICDGDLVDSQIRSKQNWSLLPAQAIYASVLPGELMRGYMTQFPTFPS |
| | WLGKHSSIGKHDRIVQDLALHMSLRTYSSKRIVNMDYLSLLRDALVQPLISQGVDGVQDV |
| | VALMDTYYLMKEDFENIMEISSWGGKPSPFSKLDPKVKAAFTRAYNKEAHLTPYSLQAIK |
| | ASRHSTSPSLDSEYNEELNEDDSQSDEKDQDAIETDAMIKKKIKSSKPSKPEKDKEPRKG |
| | KGKSSKK |
| DNA ligase I | VI.9 |

[1388] More specifically, in some embodiments, the down-regulator of the MMR pathway may be an inhibitor of (e.g., an siRNA against) one or more factors of Table VI.15, a down-regulator listed in Table VI.16, or any combination thereof. Inhibitors of some of the proteins of Table VI.15 above are listed elsewhere in this specification.

TABLE VI.16
Down-regulators of MMR
1. Msh2

| | |
|---|---|
| siRNA | Commercially available from Dharmacon or Ambion |

2. Msh3

| | |
|---|---|
| siRNA | Commercially available from Dharmacon or Ambion |

3. Msh6

| | |
|---|---|
| siRNA | Commercially available from Dharmacon or Ambion |

4. Mlh1

| | |
|---|---|
| siRNA | Commercially available from Dharmacon or Ambion |

5. Pms2

| | |
|---|---|
| siRNA | Commercially available from Dharmacon or Ambion |

6. Compounds that down-regulate MMR

Cadmium (Cd²⁺)

### VI.8 Base Excision Repair (BER)

[1389] The base excision repair (BER) pathway is active throughout the cell cycle; it is responsible primarily for removing small, non-helix-distorting base lesions from the genome. In contrast, the related Nucleotide Excision Repair (NER) pathway (discussed below) repairs bulky helix-distorting lesions (see, e.g., Caldecott (2008) NAT. REV. GENET. 9: 619-31. A brief description of the BER is provided below.

[1390] Upon DNA base damage, BER is initiated and the process can be simplified into five major steps: (a) removal of the damaged DNA base; (b) incision of the subsequent a basic site; (c) clean-up of the DNA ends; (d) insertion of the correct nucleotide into the repair gap; and (e) ligation of the remaining nick in the DNA backbone. These last steps are similar to the SSBR pathway.

[1391] In the first step, a damage-specific DNA glycosylase excises the damaged base through cleavage of the N-glycosidic bond linking the base to the sugar phosphate backbone. Then AP endonuclease-1 (APE1) or bifunctional DNA glycosylases with an associated lyase activity incise the phosphodiester backbone to create a DNA single strand break (SSB). The third step of BER involves procession (i.e., cleaning-up) of the DNA ends. The fourth step in BER is conducted by DNA polymerase beta (Pol beta) which adds a new complementary nucleotide to the repair gap. In the final step, XRCC1/Ligase III seal the remaining nick in the DNA backbone. This completes the short-patch BER pathway through which the majority (˜80%) of damaged DNA bases are repaired. However, if the 5′-ends in step 3 are resistant to end-processing activity, following one nucleotide insertion by DNA polymerase beta, a polymerase switch to the replicative DNA polymerases delta/epsilon occurs, which then add ˜2-8 more nucleotides into the DNA repair gap. This creates a 5′-flap structure, which is recognized and excised by flap endonuclease-1 (FEN-1) in association with the processivity factor proliferating cell nuclear antigen (PCNA). DNA ligase I then seals the remaining nick in the DNA backbone and completes long-patch BER. Additional factors are listed in Table VI.17.

[1392] In some embodiments, the methods described herein involve down-regulating the BER pathway in order to promote HDR (e.g., HR, alt-HR or SSA). For instance, in some embodiments, the methods may involve modulating, e.g., inhibiting, a component (e.g., exactly one component, or one or more components, e.g., two or three components) of the BER pathway, e.g., a component of Table VI.17. More specifically, in some embodiments, the methods may involve modulating, e.g., inhibiting, exactly one of, or one or more of DNA glycosylase, APE1, Pol beta, Pol delta, Pol epsilon, XRCC1, Ligase III, FEN-1, PCNA, RECQL4, WRN, MYH, PNKP, and APTX. Up-regulation of HDR, in some embodiments, is achieved using siRNA directed against one or more of the components listed in Table VI.17. In some embodiments, a BER pathway is down regulated using an HDR-enhancing gRNA that targets a component of a BER pathway, e.g., one or more of the components listed in Table VI.17 (e.g., one or more of DNA glycosylase, APE1, Pol beta, Pol delta, Pol epsilon, XRCC1, Ligase III, FEN-1, PCNA, RECQL4, WRN, MYH, PNKP, and APTX). In some embodiments, the HDR-enhancing gRNA is used in combination with an eiCas9 molecule. In some embodiments, the HDR-enhancing gRNA is used in combination with an eaCas9 molecule. In some embodiments, the HDR-enhancing gRNA is administered to the cell as a HDR-enhancing gRNA:Cas9 molecule complex.

[1393] In some embodiments, one or more of HDR, alt-HR, anti-HR, NHEJ, MMEJ, SSA, SSBR, NER, and MMR are not substantially down-regulated, e.g., in some embodiments the only DNA damage repair pathway to be substantially down-regulated is the BER pathway.

TABLE VI.17
Factors Involved in BER

| Factor | Sequence |
|---|---|
| DNA glycosylase | — |
| APE1 | See Table VI.13 |
| Pol beta | See Table VI.13 |
| Pol delta | See Table VI.13 |
| Pol epsilon | See Table VI.13 |
| XRCC1 | See Table VI.13 |
| Ligase III | See Table VI.9 |
| FEN-1 | See Table VI.2 |
| PCNA | See Table VI.13 |
| RECQL4 | MERLRDVRERLQAWERAFRRQRGRRPSQDDVEAAPEETRALYREYRTLKRTTGQAGGGLR |
| | SSESLPAAAEEAPEPRCWGPHLNRAATKSPQSTPGRSRQGSVPDYGQRLKANLKGTLQAG |
| | PALGRRPWPLGRASSKASTPKPPGTGPVPSFAEKVSDEPPQLPEPQPRPGRLQHLQASLS |
| | QRLGSLDPGWLQRCHSEVPDFLGAPKACRPDLGSEESQLLIPGESAVLGPGAGSQGPEAS |
| | AFQEVSIRVGSPQPSSSGGEKRRWNEEPWESPAQVQQESSQAGPPSEGAGAVAVEEDPPG |
| | EPVQAQPPQPCSSPSNPRYHGLSPSSQARAGKAEGTAPLHIFPRLARHDRGNYVRLNMKQ |
| | KHYVRGRALRSRLLRKQAWKQKWRKKGECFGGGGATVTTKESCFLNEQFDHWAAQCPRPA |
| | SEEDTDAVGPEPLVPSPQPVPEVPSLDPTVLPLYSLGPSGQLAETPAEVFQALEQLGHQA |
| | FRPGQERAVMRILSGISTLLVLPTGAGKSLCYQLPALLYSRRSPCLTLVVSPLLSLMDDQ |
| | VSGLPPCLKAACIHSGMTRKQRESVLQKIRAAQVHVLMLTPEALVGAGGLPPAAQLPPVA |
| | FACIDEAHCLSQWSHNFRPCYLRVCKVLRERMGVHCFLGLTATATRRTASDVAQHLAVAE |
| | EPDLHGPAPVPTNLHLSVSMDRDTDQALLTLLQGKRFQNLDSIIIYCNRREDTERIAALL |
| | RTCLHAAWVPGSGGRAPKTTAEAYHAGMCSRERRRVQRAFMQGQLRVVVATVAFGMGLDR |
| | PDVRAVLHLGLPPSFESYVQAVGRAGRDGQPAHCHLFLQPQGEDLRELRRHVHADSTDFL |
| | AVKRLVQRVFPACTCTCTRPPSEQEGAVGGERPVPKYPPQEAEQLSHQAAPGPRRVCMGH |
| | ERALPIQLTVQALDMPEEAIETLLCYLELHPHHWLELLATTYTHCRLNCPGGPAQLQALA |
| | HRCPPLAVCLAQQLPEDPGQGSSSVEFDMVKLVDSMGWELASVRRALCQLQWDHEPRTGV |
| | RRGTGVLVEFSELAFHLRSPGDLTAEEKDQICDFLYGRVQARERQALARLRRTFQAFHSV |
| | AFPSCGPCLEQQDEERSTRLKDLLGRYFEEEEGQEPGGMEDAQGPEPGQARLQDWEDQVR |
| | CDIRQFLSLRPEEKFSSRAVARIFHGIGSPCYPAQVYGQDRRFWRKYLHLSFHALVGLAT |
| | EELLQVAR (RECQL4 CCDS 75804.1) (SEQ ID NO: 365) |
| WRN | See Table VI.2 |
| MYH | MTPLVSRLSRLWAIMRKPRAAVGSGHRKQAASQEGRQKHAKNNSQAKPSACDGLARQPEEVVLQASVSSY |
| | HLFRDVAEVTAFRGSLLSWYDQEKRDLPWRRRAEDEMDLDRRAYAVWVSEVMLQQTQVATVINYYTGWMQ |
| | KWPTLQDLASASLEEVNQLWAGLGYYSRGRRLQEGARKVVEELGGHMPRTAETLQQLLPGVGRYTAGAIA |
| | SIAFGQATGVVDGNVARVLCRVRAIGADPSSTLVSQQLWGLAQQLVDPARPGDFNQAAMELGATVCTPQR |
| | PLCSQCPVESLCRARQRVEQEQLLASGSLSGSPDVEECAPNTGQCHLCLPPSEPWDQTLGVVNFPRKASR |
| | KPPREESSATCVLEQPGALGAQILLVQRPNSGLLAGLWEFPSVTWEPSEQLQRKALLQELQRWAGPLPAT |
| | HLRHLGEVVHTFSHIKLTYQVYGLALEGQTPVTTVPPGARWLTQEEFHTAAVSTAMKKVFRVYQGQQPGT |
| | CMGSKRSQVSSPCSRKKPRMGQQVLDNFFRSHISTDAHSLNSAAQ (MYH sequence 1) |
| | (SEQ ID NO: 366) |
| | MRKPRAAVGSGHRKQAASQEGRQKHAKNNSQAKPSACDAGLARQPEEVVLQASVSSYHLFRDVAEVTAFR |
| | GSLLSWYDQEKRDLPWRRRAEDEMDLDRRAYAVWVSEVMLQQTQVATVINYYTGWMQKWPTLQDLASASL |
| | EEVNQLWAGLGYYSRGRRLQEGARKVVEELGGHMPRTAETLQQLLPGVGRYTAGAIASIAFGQATGVVDG |
| | NVARVLCRVRAIGADPSSTLVSQQLWGLAQQLVDPARPGDFNQAAMELGATVCTPQRPLCSQCPVESLCR |
| | ARQRVEQEQLLASGSLSGSPDVEECAPNTGQCHLCLPPSEPWDQTLGVVNFPRKASRKPPREESSATCVL |
| | EQPGALGAQILLVQRPNSGLLAGLWEEPSVTWEPSEQLQRKALLQELQRWAGPLPATHLRHLGEVVHTFS |
| | HIKLTYQVYGLALEGQTPVTTVPPGARWLTQEEFHTAAVSTAMKKVFRVYQGQQPGTCMGSKRSQVSSPC |
| | SRKKPRMGQQVLDNFFRSHISTDAHSLNSAAQ (MYH sequence 2) (SEQ ID NO: 367) |
| | MRKPRAAVGSGHRKQAASQEGRQKHAKNNSQAKPSACDGLARQPEEVVLQASVSSYHLFRDVAEVTAFRG |
| | SLLSWYDQEKRDLPWRRRAEDEMDLDRRAYAVWVSEVMLQQTQVATVINYYTGWMQKWPTLQDLASASLE |
| | EVNQLWAGLGYYSRGRRLQEGARKVVEELGGHMPRTAETLQQLLPGVGRYTAGAIASIAFGQATGVVDGN |
| | VARVLCRVRAIGADPSSTLVSQQLWGLAQQLVDPARPGDFNQAAMELGATVCTPQRPLCSQCPVESLCRA |
| | RQRVEQEQLLASGSLSGSPDVEECAPNTGQCHLCLPPSEPWDQTLGVVNFPRKASRKPPREESSATCVLE |
| | QPGALGAQILLVQRPNSGLLAGLWEFPSVTWEPSEQLQRKALLQELQRWAGPLPATHLRHLGEVVHTFSH |
| | IKLTYQVYGLALEGQTPVTTVPPGARWLTQEEFHTAAVSTAMKKVFRVYQGQQPGTCMGSKRSQVSSPCS |
| | RKKPRMGQQVLDNFFRSHISTDAHSLNSAAQ (MYH sequence 3) (SEQ ID NO: 368) |
| | MTPLVSRLSRLWAIMRKPRAAVGSGHRKQAASQEGRQKHAKNNSQAKPSACDAGLARQPEEVVLQASVSS |
| | YHLFRDVAEVTAFRGSLLSWYDQEKRDLPWRRRAEDEMDLDRRAYAVWVSEVMLQQTQVATVINYYTGWM |
| | QKWPTLQDLASASLEEVNQLWAGLGYYSRGRRLQEGARKVVEELGGHMPRTAETLQQLLPGVGRYTAGAI |
| | ASIAFGQATGVVDGNVARVLCRVRAIGADPSSTLVSQQLWGLAQQLVDPARPGDFNQAAMELGATVCTPQ |
| | RPLCSQCPVESLCRARQRVEQEQLLASGSLSGSPDVEECAPNTGQCHLCLPPSEPWDQTLGVVNFPRKAS |
| | RKPPREESSATCVLEQPGALGAQILLVQRPNSGLLAGLWEFPSVTWEPSEQLQRKALLQELQRWAGPLPA |
| | THLRHLGEVVHTFSHIKLTYQVYGLALEGQTPVTTVPPGARWLTQEEFHTAAVSTAMKKVFRVYQGQQPG |
| | TCMGSKRSQVSSPCSRKKPRMGQQVLDNFFRSHISTDAHSLNSAAQ (MYH sequence 4) |
| | (SEQ ID NO: 369) |
| PNKP | See Table VI.7 |
| APTX | See Table VI.13 |

[1394] More specifically, in some embodiments, the down-regulator of the BER pathway may be an inhibitor of (e.g., an siRNA against) one or more factors of Table VI.17, or any combination thereof. Inhibitors of some of the proteins of Table VI.17 above are listed elsewhere in this specification.

### VI.9 Nucleotide Excision Repair (NER)

[1395] The nucleotide excision repair (NER) pathway is an important excision mechanism that removes bulky helix-distorting lesions from DNA (see, e.g., Marteijn et al. (2014) NAT. REV. MOL. CELL BIOL. 15: 465-481). A brief description of NER is provided below.

[1396] NER a broad pathway encompassing two smaller pathways: global genomic NER (GG-NER) and transcription coupled repair NER (TC-NER). GG-NER and TC-NER use different factors for recognizing DNA damage. However, they utilize the same machinery for lesion incision, repair, and ligation.

[1397] Once damage is recognized, the cell removes a short single-stranded DNA segment that contains the lesion. Endonucleases XPF/ERCC1 and XPG (encoded by ERCC5) remove the lesion by cutting the damaged strand on either side of the lesion, resulting in a single-strand gap of 22-30 nucleotides. Next, the cell performs DNA gap filling synthesis and ligation. Involved in this process are: PCNA; RFC; DNA polymerase delta, DNA polymerase epsilon (Pol epsilon) and/or DNA Polymerase kappa (Pol kappa); and DNA ligase I and/or XRCC1/Ligase III. Replicating cells tend to use DNA polymerase epsilon and DNA ligase I, while non-replicating cells tend to use DNA polymerase delta, DNA polymerase kappa, and the XRCC1/Ligase III complex to perform the ligation step.

[1398] NER can involve one or more of the following factors: XPA-G, POLH, XPF, ERCC1, and LIG1. Transcription-coupled NER (TC-NER) can involve one or more of the following factors: CSA, CSB, XPB, XPD, XPG, ERCC1, and TTDA. Additional factors are shown in Table VI.18.

[1399] In some embodiments, the methods described herein involve down-regulating the NER pathway in order to promote HDR (e.g., HR, alt-HR or SSA). For instance, in some embodiments, the methods may involve modulating, e.g., inhibiting, a component (e.g., exactly one component, or one or more components, e.g., two or three components) of the NER pathway, e.g., a component of Table VI.18. More specifically, in some embodiments, the methods may involve modulating, e.g., inhibiting, exactly one of, or one or more of XPA-G, POLH, XPF, ERCC1, LIG1, CSA, CSB, XPA, XPB, XPC, XPD, XPF, XPG, ERCC1, TTDA, UVSSA, USP7, CETN2, RAD23B, UV-DDB, CAK subcomplex, RPA, and PCNA. Up-regulation of HDR, in some embodiments, is achieved using siRNA directed against one or more of the components listed in Table VI.1. In some embodiments, a NER pathway is down regulated using an HDR-enhancing gRNA that targets a component of a NER pathway, e.g., one or more of the components listed in Table VI.18 (e.g., one or more of XPA-G, POLH, XPF, ERCC1, LIG1, CSA, CSB, XPA, XPB, XPC, XPD, XPF, XPG, ERCC1, TTDA, UVSSA, USP7, CETN2, RAD23B, UV-DDB, CAK subcomplex, RPA, and PCNA). In some embodiments, the HDR-enhancing gRNA is used in combination with an eiCas9 molecule. In some embodiments, the HDR-enhancing gRNA is used in combination with an eaCas9 molecule. In some embodiments, the HDR-enhancing gRNA is administered to the cell as a HDR-enhancing gRNA:Cas9 molecule complex.

[1400] In some embodiments, one or more of HDR, alt-HR, anti-HR, NHEJ, MMEJ, SSA, SSBR, BER, and MMR are not substantially down-regulated, e.g., in some embodiments the only DNA damage repair pathway to be substantially down-regulated is the NER pathway.

TABLE VI.18
Factors Involved in NER.

| Factor | Sequence |
|---|---|
| XPA-G | — |
| POLH | >sp\|Q9Y253\|POLH_HUMAN DNA polymerase eta OS = Homo sapiens GN = POLH |
| | PE = 1 SV = 1 (SEQ ID NO: 370) |
| | MATGQDRVVALVDMDCFFVQVEQRQNPHLRNKPCAVVQYKSWKGGGIIAVSYEARAFGVT |
| | RSMWADDAKKLCPDLLLAQVRESRGKANLTKYREASVEVMEIMSRFAVIERASIDEAYVD |
| | LTSAVQERLQKLQGQPISADLLPSTYIEGLPQGPTTAEETVQKEGMRKQGLFQWLDSLQI |
| | DNLTSPDLQLTVGAVIVEEMRAAIERETGFQCSAGISHNKVLAKLACGLNKPNRQTLVSH |
| | GSVPQLFSQMPIRKIRSLGGKLGASVIEILGIEYMGELTQFTESQLQSHFGEKNGSWLYA |
| | MCRGIEHDPVKPRQLPKTIGCSKNFPGKTALATREQVQWWLLQLAQELEERLTKDRNDND |
| | RVATQLVVSIRVQGDKRLSSLRRCCALTRYDAHKMSHDAFTVIKNCNTSGIQTEWSPPLT |
| | MLFLCATKFSASAPSSSTDITSFLSSDPSSLPKVPVTSSEAKTQGSGPAVTATKKATTSL |
| | ESFFQKAAERQKVKEASLSSLTAPTQAPMSNSPSKPSLPFQTSQSTGTEPFFKQKSLLLK |
| | QKQLNNSSVSSPQQNPWSNCKALPNSLPTEYPGCVPVCEGVSKLEESSKATPAEMDLAHN |
| | SQSMHASSASKSVLEVTQKATPNPSLLAAEDQVPCEKCGSLVPVWDMPEHMDYHFALELQ |
| | KSFLQPHSSNPQVVSAVSHQGKRNPKSPLACTNKRPRPEGMQTLESFFKPLTH |
| | >sp\|Q9Y253-2\|POLH_HUMAN Isoform 2 of DNA polymerase eta OS = Homo |
| | sapiens GN = POLH (SEQ ID NO: 371) |
| | MATGQDRVVALVDMDCFFVQVEQRQNPHLRNKPCAVVQYKSWKGGGIIAVSYEARAFGVT |
| | RSMWADDAKKLCPDLLLAQVRESRGKANLTKYREASVEVMEIMSRFAVIERASIDEAYVD |
| | LTSAVQERLQKLQGQPISADLLPSTYIEGLPQGPTTAEETVQKEGMRKQGLFQWLDSLQI |
| | DNLTSPDLQLTVGAVIVEEMRAAIERETGFQCSAGISHNKVLAKLACGLNKPNRQTLVSH |
| | GSVPQLFSQMPIRKIRSLGGKLGASVIEILGIEYMGELTQFTESQLQSHFGEKNGSWLYA |
| | MCRGIEHDPVKPRQLPKTIGCSKNFPGKTALATREQVQWWLLQLAQELEERLTKDRNDND |
| | RVATQLVVSIRVQGDKRLSSLRRCCALTRYDAHKMSHDAFTVIKNCNTSGIQTE |
| XPF | See Table VI.9 |
| ERCC1 | See Table VI.9 |
| LIG1 | See Table VI.9 |
| CSA (also called | >sp\|Q13216\|ERCC8_HUMAN DNA excision repair protein ERCC-8 OS = Homo |
| ERCC8) | sapiens GN = ERCC8 PE = 1 SV = 1 (SEQ ID NO: 372) |
| | MLGFLSARQTGLEDPLRLRRAESTRRVLGLELNKDRDVERIHGGGINTLDIEPVEGRYML |
| | SGGSDGVIVLYDLENSSRQSYYTCKAVCSIGRDHPDVHRYSVETVQWYPHDTGMFTSSSF |
| | DKTLKVWDTNTLQTADVFNFEETVYSHHMSPVSTKHCLVAVGTRGPKVQLCDLKSGSCSH |
| | ILQGHRQEILAVSWSPRYDYILATASADSRVKLWDVRRASGCLITLDQHNGKKSQAVESA |
| | NTAHNGKVNGLCFTSDGLHLLTVGTDNRMRLWNSSNGENTLVNYGKVCNNSKKGLKFTVS |
| | CGCSSEFVFVPYGSTIAVYTVYSGEQITMLKGHYKTVDCCVFQSNFQELYSGSRDCNILA |
| | WVPSLYEPVPDDDETTTKSQLNPAFEDAWSSSDEEG |
| | >sp\|Q13216-2\|ERCC8_HUMAN Isoform 2 of DNA excision repair protein |
| | ERCC-8 OS = Homo sapiens GN = ERCC8 (SEQ ID NO: 373) |
| | MLGFLSARQTGLEDPLRLRRAESTRRVLGLELNKDRDVERIHGGGINTLDIEPVEGRYML |
| | SGGSDGVIVLYDLENSSRQSYYTCKAVCSIGRDHPDVHRYSVETVQWYPHDTGMFTSSSF |
| | DKTLKVWDTNTLQTADVFNFEETVYSHHMSPVSTKHCLVAVGTRGPKVQLCDLKSGSCSH |
| | ILQGIFILFQTATTLSKRFNKKKRY |
| CSB (also called | >sp\|Q03468\|ERCC6_HUMAN DNA excision repair protein ERCC-6 OS = Homo |
| ERCC6) | sapiens GN = ERCC6 PE = 1 SV = 1 (SEQ ID NO: 374) |
| | MPNEGIPHSSQTQEQDCLQSQPVSNNEEMAIKQESGGDGEVEEYLSFRSVGDGLSTSAVG |
| | CASAAPRRGPALLHIDRHQIQAVEPSAQALELQGLGVDVYDQDVLEQGVLQQVDNAIHEA |
| | SRASQLVDVEKEYRSVLDDLTSCTTSLRQINKIIEQLSPQAATSRDINRKLDSVKRQKYN |
| | KEQQLKKITAKQKHLQAILGGAEVKIELDHASLEEDAEPGPSSLGSMLMPVQETAWEELI |
| | RTGQMTPFGTQIPQKQEKKPRKIMLNEASGFEKYLADQAKLSFERKKQGCNKRAARKAPA |
| | PVTPPAPVQNKNKPNKKARVLSKKEERLKKHIKKLQKRALQFQGKVGLPKARRPWESDMR |
| | PEAEGDSEGEESEYFPTEEEEEEEDDEVEGAEADLSGDGTDYELKPLPKGGKRQKKVPVQ |
| | EIDDDFFPSSGEEAEAASVGEGGGGGRKVGRYRDDGDEDYYKQRLRRWNKLRLQDKEKRL |
| | KLEDDSEESDAEFDEGFKVPGFLFKKLFKYQQTGVRWLWELHCQQAGGILGDEMGLGKTI |
| | QIIAFLAGLSYSKIRTRGSNYRFEGLGPTVIVCPTTVMHQWVKEFHTWWPPFRVAILHET |
| | GSYTHKKEKLIRDVAHCHGILITSYSYIRLMQDDISRYDWHYVILDEGHKIRNPNAAVTL |
| | ACKQFRTPHRIILSGSPMQNNLRELWSLFDFIFPGKLGTLPVFMEQFSVPITMGGYSNAS |
| | PVQVKTAYKCACVLRDTINPYLLRRMKSDVKMSLSLPDKNEQVLFCRLTDEQHKVYQNFV |
| | DSKEVYRILNGEMQIFSGLIALRKICNHPDLFSGGPKNLKGLPDDELEEDQFGYWKRSGK |
| | MIVVESLLKIWHKQGQRVLLFSQSRQMLDILEVFLRAQKYTYLKMDGTTTIASRQPLITR |
| | YNEDTSIFVFLLTTRVGGLGVNLTGANRVVIYDPDWNPSTDTQARERAWRIGQKKQVTVY |
| | RLLTAGTIEEKIYHRQIFKQFLTNRVLKDPKQRRFFKSNDLYELFTLTSPDASQSTETSA |
| | IFAGTGSDVQTPKCHLKRRIQPAFGADHDVPKRKKFPASNISVNDATSSEEKSEAKGAEV |
| | NAVTSNRSDPLKDDPHMSSNVTSNDRLGEETNAVSGPEELSVISGNGECSNSSGTGKTSM |
| | PSGDESIDEKLGLSYKRERPSQAQTEAFWENKQMENNFYKHKSKTKHHSVAEEETLEKHL |
| | RPKQKPKNSKHCRDAKFEGTRIPHLVKKRRYQKQDSENKSEAKEQSNDDYVLEKLFKKSV |
| | GVHSVMKHDAIMDGASPDYVLVEAEANRVAQDALKALRLSRQRCLGAVSGVPTWTGHRGI |
| | SGAPAGKKSRFGKKRNSNFSVQHPSSTSPTEKCQDGIMKKEGKDNVPEHFSGRAEDADSS |
| | SGPLASSSLLAKMRARNHLILPERLESESGHLQEASALLPTTEHDDLLVEMRNFIAFQAH |
| | TDGQASTREILQEFESKLSASQSCVFRELLRNLCTFHRTSGGEGIWKLKPEYC |
| XPA | >sp\|P23025\|XPA_HUMAN DNA repair protein complementing XP-A cells |
| | OS = Homo sapiens GN = XPA PE = 1 SV = 1 (SEQ ID NO: 375) |
| | MAAADGALPEAAALEQPAELPASVRASIERKRQRALMLRQARLAARPYSATAAAATGGMA |
| | NVKAAPKIIDTGGGFILEEEEEEEQKIGKVVHQPGPVMEFDYVICEECGKEFMDSYLMNH |
| | FDLPTCDNCRDADDKHKLITKTEAKQEYLLKDCDLEKREPPLKFIVKKNPHHSQWGDMKL |
| | YLKLQIVKRSLEVWGSQEALEEAKEVRQENREKMKQKKFDKKVKELRRAVRSSVWKRETI |
| | VHQHEYGPEENLEDDMYRKTCTMCGHELTYEKM |
| XPB | MGKRDRADRDKKKSRKRHYEDEEDDEEDAPGNDPQEAVPSAAGKQVDESGTKVDEYGAKD |
| | YRLQMPLKDDHTSRPLWVAPDGHIFLEAFSPVYKYAQDFLVAIAEPVCRPTHVHEYKLTA |
| | YSLYAAVSVGLQTSDITEYLRKLSKTGVPDGIMQFIKLCTVSYGKVKLVLKHNRYFVESC |
| | HPDVIQHLLQDPVIRECRLRNSEGEATELITETFTSKSAISKTAESSGGPSTSRVTDPQG |
| | KSDIPMDLFDFYEQMDKDEEEEEETQTVSFEVKQEMIEELQKRCIHLEYPLLAEYDFRND |
| | SVNPDINIDLKPTAVLRPYQEKSLRKMFGNGRARSGVIVLPCGAGKSLVGVTAACTVRKR |
| | CLVLGNSAVSVEQWKAQFKMWSTIDDSQICRFTSDAKDKPIGCSVAISTYSMLGHTTKRS |
| | WEAERVMEWLKTQEWGLMILDEVHTIPAKMFRRVLTIVQAHCKLGLTATLVREDDKIVDL |
| | NFLIGPKLYEANWMELQNNGYIAKVQCAEVWCPMSPEFYREYVAIKTKKRILLYTMNPNK |
| | FRACQFLIKFHERRNDKIIVFADNVFALKEYAIRLNKPYIYGPTSQGERMQILQNFKHNP |
| | KINTIFISKVGDTSFDLPEANVLIQISSHGGSRRQEAQRLGRVLRAKKGMVAEEYNAFFY |
| | SLVSQDTQEMAYSTKRQRFLVDQGYSFKVITKLAGMEEEDLAFSTKEEQQQLLQKVLAAT |
| | DLDAEEEVVAGEFGSRSSQASRRFGTMSSMSGADDTVYMEYHSSRSKAPSKHVHPLFKRF |
| | RK (XPB CCDS 2144.1) (SEQ ID NO: 376) |
| XPC | >sp\|Q01831\|XPC_HUMAN DNA repair protein complementing XP-C cells |
| | OS = Homo sapiens GN = XPC PE = 1 SV = 4 (SEQ ID NO: 377) |
| | MARKRAAGGEPRGRELRSQKSKAKSKARREEEEEDAFEDEKPPKKSLLSKVSQGKRKRGC |
| | SHPGGSADGPAKKKVAKVTVKSENLKVIKDEALSDGDDLRDFPSDLKKAHHLKRGATMNE |
| | DSNEEEEESENDWEEVEELSEPVLGDVRESTAFSRSLLPVKPVEIEIETPEQAKTRERSE |
| | KIKLEFETYLRRAMKRFNKGVHEDTHKVHLLCLLANGFYRNNICSQPDLHAIGLSIIPAR |
| | FTRVLPRDVDTYYLSNLVKWFIGTFTVNAELSASEQDNLQTTLERRFAIYSARDDEELVH |
| | IFLLILRALQLLTRLVLSLQPIPLKSATAKGKKPSKERLTADPGGSSETSSQVLENHTKP |
| | KTSKGTKQEETFAKGTCRPSAKGKRNKGGRKKRSKPSSSEEDEGPGDKQEKATQRRPHGR |
| | ERRVASRVSYKEESGSDEAGSGSDFELSSGEASDPSDEDSEPGPPKQRKAPAPQRTKAGS |
| | KSASRTHRGSHRKDPSLPAASSSSSSSKRGKKMCSDGEKAEKRSIAGIDQWLEVFCEQEE |
| | KWVCVDCVHGVVGQPLTCYKYATKPMTYVVGIDSDGWVRDVTQRYDPVWMTVTRKCRVDA |
| | EWWAETLRPYQSPFMDREKKEDLEFQAKHMDQPLPTAIGLYKNHPLYALKRHLLKYEATY |
| | PETAAILGYCRGEAVYSRDCVHTLHSRDTWLKKARVVRLGEVPYKMVKGFSNRARKARLA |
| | EPQLREENDLGLFGYWQTEEYQPPVAVDGKVPRNEFGNVYLFLPSMMPIGCVQLNLPNLH |
| | RVARKLDIDCVQAITGFDFHGGYSHPVTDGYIVCEEFKDVLLTAWENEQAVIERKEKEKK |
| | EKRALGNWKLLAKGLLIRERLKRRYGPKSEAAAPHTDAGGGLSSDEEEGTSSQAEAARIL |
| | AASWPQNREDEEKQKLKGGPKKTKREKKAAASHLFPFEQL |
| | >sp\|Q01831-2\|XPC_HUMAN Isoform 2 of DNA repair protein complementing |
| | XP-C cells OS = Homo sapiens GN = XPC (SEQ ID NO: 378) |
| | MARKRAAGGEPRGRELRSQKSKAKSKARREEEEEDAFEDEKPPKKSLLSKVSQGKRKRGC |
| | SHPGGSADGPAKKKVAKVTVKSENLKVIKDEALSDGDDLRDFPSDLKKAHHLKRGATMNE |
| | DSNEEEEESENDWEEAKTRERSEKIKLEFETYLRRAMKRFNKGVHEDTHKVHLLCLLANG |
| | FYRNNICSQPDLHAIGLSIIPARFTRVLPRDVDTYYLSNLVKWFIGTFTVNAELSASEQD |
| | NLQTTLERRFAIYSARDDEELVHIFLLILRALQLLTRLVLSLQPIPLKSATAKGKKPSKE |
| | RLTADPGGSSETSSQVLENHTKPKTSKGTKQEETFAKGTCRPSAKGKRNKGGRKKRSKPS |
| | SSEEDEGPGDKQEKATQRRPHGRERRVASRVSYKEESGSDEAGSGSDFELSSGEASDPSD |
| | EDSEPGPPKQRKAPAPQRTKAGSKSASRTHRGSHRKDPSLPAASSSSSSSKRGKKMCSDG |
| | EKAEKRSIAGIDQWLEVFCEQEEKWVCVDCVHGVVGQPLTCYKYATKPMTYVVGIDSDGW |
| | VRDVTQRYDPVWMTVIRKCRVDAEWWAETLRPYQSPFMDREKKEDLEFQAKHMDQPLPTA |
| | IGLYKNHPLYALKRHLLKYEATYPETAAILGYCRGEAVYSRDCVHTLHSRDTWLKKARVV |
| | RLGEVPYKMVKGFSNRARKARLAEPQLREENDLGLFGYWQTEEYQPPVAVDGKVPRNEFG |
| | NVYLFLPSMMPIGCVQLNLPNLHRVARKLDIDCVQAITGFDFHGGYSHPVTDGYIVCEEF |
| | KDVLLTAWENEQAVIERKEKEKKEKRALGNWKLLAKGLLIRERLKRRYGPKSEAAAPHTD |
| | AGGGLSSDEEEGTSSQAEAARILAASWPQNREDEEKQKLKGGPKKTKREKKAAASHLFPF |
| | EQL |
| | >sp\|Q01831-3\|XPC_HUMAN Isoform 3 of DNA repair protein complementing |
| | XP-C cells OS = Homo sapiens GN = XPC (SEQ ID NO: 379) |
| | MARKRAAGGEPRGRELRSQKSKAKSKARREEEEEDAFEDEKPPKKSLLSKVSQGKRKRGC |
| | SHPGGSADGPAKKKVAKVTVKSENLKVIKDEALSDGDDLRDFPSDLKKAHHLKRGATMNE |
| | DSNEEEEESENDWEEVEVKR |
| XPD | MKLNVDGLLVYFPYDYTYPEQFSYMRELKRTLDAKGHGVLEMPSGTGKTVSLLALIMAYQ |
| | RAYPLEVTKLIYCSRTVPEIEKVIEELRKLLNFYEKQEGEKLPFLGLALSSRKNLCIHPE |
| | VTPLRFGKDVDGKCHSLTASYVRAQYQHDTSLPHCRFYEEFDAHGREVPLPAGIYNLDDL |
| | KALGRRQGWCPYFLARYSILHANVVVYSYHYLLDPKIADLVSKELARKAVVVFDEAHNID |
| | NVCIDSMSVNLTRRTLDRCQGNLETLQKTVLRIKETDEQRLRDEYRRLVEGLREASAARE |
| | TDAHLANPVLPDEVLQEAVPGSIRTAEHFLGFLRRLLEYVKWRLRVQHVVQESPPAFLSG |
| | LAQRVCIQRKPLRFCAERLRSLLHTLEITDLADFSPLTLLANFATLVSTYAKGFTIIIEP |
| | FDDRTPTIANPILHFSCMDASLAIKPVFERFQSVIITSGTLSPLDIYPKILDFHPVTMAT |
| | FTMTLARVCLCPMIIGRGNDQVAISSKFETREDIAVIRNYGNLLLEMSAVVPDGIVAFFT |
| | SYQYMESTVASWYEQGILENIQRNKLLFIETQDGAETSVALEKYQEACENGRGAILLSVA |
| | RGKVSEGIDFVHHYGRAVIMFGVPYVYTQSRILKARLEYLRDQFQIRENDFLTFDAMRHA |
| | AQCVGRAIRGKTDYGLMVFADKRFARGDKRGKLPRWIQEHLTDANLNLTVDEGVQVAKYF |
| | LRQMAQPFHREDQLGLSLLSLEQLESEETLKRIEQIAQQL (XPD Isoform 1 |
| | CCDS 33049.1) (SEQ ID NO: 380) |
| | MRELKRTLDAKGHGVLEMPSGTGKTVSLLALIMAYQRAYPLEVTKLIYCSRTVPEIEKVI |
| | EELRKLLNFYEKQEGEKLPFLGLALSSRKNLCIHPEVTPLRFGKDVDGKCHSLTASYVRA |
| | QYQHDTSLPHCRFYEEFDAHGREVPLPAGIYNLDDLKALGRRQGWCPYFLARYSILHANV |
| | VVYSYHYLLDPKIADLVSKELARKAVVVFDEAHNIDNVCIDSMSVNLTRRTLDRCQGNLE |
| | TLQKTVLRIKETDEQRLRDEYRRLVEGLREASAARETDAHLANPVLPDEVLQEAVPGSIR |
| | TAEHFLGFLRRLLEYVKWRLRVQHVVQESPPAFLSGLAQRVCIQRKPLRFCAERLRSLLH |
| | TLEITDLADFSPLTLLANFATLVSTYAKGQAQHCGSSRNQKRSHP (XPD |
| | Isoform 2 CCDS 46112.1) (SEQ ID NO: 381) |
| XPF | See Table VI.9 |
| XPG | MGVQGLWKLLECSGRQVSPEALEGKILAVDISIWLNQALKGVRDRHGNSIENPHLLTLFH |
| | RLCKLLFFRIRPIFVFDGDAPLLKKQTLVKRRQRKDLASSDSRKTTEKLLKTFLKRQAIK |
| | TAFRSKRDEALPSLTQVRRENDLYVLPPLQEEEKHSSEEEDEKEWQERMNQKQALQEEFF |
| | HNPQAIDIESEDFSSLPPEVKHEILTDMKEFTKRRRTLFEAMPEESDDFSQYQLKGLLKK |
| | NYLNQHIEHVQKEMNQQHSGHIRRQYEDEGGFLKEVESRRVVSEDTSHYILIKGIQAKTV |
| | AEVDSESLPSSSKMHGMSFDVKSSPCEKLKTEKEPDATPPSPRILLAMQAALLGSSSEEE |
| | LESENRRQARGRNAPAAVDEGSISPRTLSAIKRALDDDEDVKVCAGDDVQTGGPGAEEMR |
| | INSSTENSDEGLKVRDGKGIPFTATLASSSVNSAEEHVASTNEGREPTDSVPKEQMSLVH |
| | VGTEAFPISDESMIKDRKDRLPLESAVVRHSDAPGLPNGRELTPASPTCTNSVSKNETHA |
| | EVLEQQNELCPYESKFDSSLLSSDDETKCKPNSASEVIGPVSLQETSSIVSVPSEAVDNV |
| | ENVVSFNAKEHENFLETIQEQQTTESAGQDLISIPKAVEPMEIDSEESESDGSFIEVQSV |
| | ISDEELQAEFPETSKPPSEQGEEELVGTREGEAPAESESLLRDNSERDDVDGEPQEAEKD |
| | AEDSLHEWQDINLEELETLESNLLAQQNSLKAQKQQQERIAATVTGQMFLESQELLRLFG |
| | IPYIQAPMEAEAQCAILDLTDQTSGTITDDSDIWLFGARHVYRNFFNKNKFVEYYQYVDF |
| | HNQLGLDRNKLINLAYLLGSDYTEGIPTVGCVTAMEILNEFPGHGLEPLLKFSEWWHEAQ |
| | KNPKIRPNPHDTKVKKKLRILQLTPGFPNPAVAEAYLKPVVDDSKGSFLWGKPDLDKIRE |
| | FCQRYFGWNRTKTDESLFPVLKQLDAQQTQLRIDSFFRLAQQEKEDAKRIKSQRLNRAVT |
| | CMLRKEKEAAASEIEAVSVAMEKEFELLDKAKGKTQKRGITNTLEESSSLKRKRLSDSKG |
| | KNTCGGFLGETCLSESSDGSSSEDAESSSLMNVQRRTAAKEPKTSASDSQNSVKEAPVKN |
| | GGATTSSSSDSDDDGGKEKMVLVTARSVFGKKRRKLRRARGRKRKT (XPG CCDS 32004.1) |
| | (SEQ ID NO: 382) |
| ERCC1 | See Table VI.9 |
| TTDA | >sp\|Q6ZYL4\|TF2H5_HUMAN General transcription factor IIH subunit 5 |
| | OS = Homo sapiens GN = GTF2H5 PE = 1 SV = 1 |
| | MVNVLKGVLIECDPAMKQFLLYLDESNALGKKFIIQDIDDTHVFVIAELVNVLQERVGEL |
| | MDQNAFSLTQK (SEQ ID NO: 383) |
| UVSSA | >sp\|Q2YD98\|UVSSA_HUMAN UV-stimulated scaffold protein A OS = Homo |
| | sapiens GN = UVSSA PE = 1 SV = 2 (SEQ ID NO: 384) |
| | MDQKLSKLVEELTTSGEPRLNPEKMKELKKICKSSEEQLSRAYRLLIAQLTQEHAEIRLS |
| | AFQIVEELFVRSHQFRMLVVSNFQEFLELTLGTDPAQPLPPPREAAQRLRQATTRAVEGW |
| | NEKFGEAYKKLALGYHFLRHNKKVDFQDTNARSLAERKREEEKQKHLDKIYQERASQAER |
| | EMQEMSGEIESCLTEVESCFRLLVPFDFDPNPETESLGMASGMSDALRSSCAGQVGPCRS |
| | GTPDPRDGEQPCCSRDLPASAGHPRAGGGAQPSQTATGDPSDEDEDSDLEEFVRSHGLGS |
| | HKYTLDVELCSEGLKVQENEDNLALIHAARDTLKLIRNKFLPAVCSWIQRFTRVGTHGGC |
| | LKRAIDLKAELELVLRKYKELDIEPEGGERRRTEALGDAEEDEDDEDFVEVPEKEGYEPH |
| | IPDHLRPEYGLEAAPEKDTVVRCLRTRTRMDEEVSDPTSAAAQLRQLRDHLPPPSSASPS |
| | RALPEPQEAQKLAAERARAPVVPYGVDLHYWGQELPTAGKIVKSDSQHRFWKPSEVEEEV |
| | VNADISEMLRSRHITFAGKFEPVQHWCRAPRPDGRLCERQDRLKCPFHGKIVPRDDEGRP |
| | LDPEDRAREQRRQLQKQERPEWQDPELMRDVEAATGQDLGSSRYSGKGRGKKRRYPSLTN |
| | LKAQADTARARIGRKVFAKAAVRRVVAAMNRMDQKKHEKFSNQFNYALN |
| | >sp\|Q2YD98-2\|UVSSA_HUMAN Isoform 2 of UV-stimulated scaffold protein |
| | A OS = Homo sapiens GN = UVSSA (SEQ ID NO: 385) |
| | MDEEVSDPISAAAQLRQLRDHLPPPSSASPSRALPEPQEAQKLAAERARAPVVPYGVDLH |
| | YWGQELPTAGKIVKSDSQHRFWKPSEVEEEVVNADISEMLRSRHITFAGKFEPVQHWCRA |
| | PRPDGRLCERQDRLKCPFHGKIVPRDDEGRPLDPEDRAREQRRQLQKQERPEWQDPELMR |
| | DVEAATGQDLGSSRYSGKGRGKKRRYPSLTNLKAQADTARARIGRKVFAKAAVRRVVAAM |
| | NRMDQKKHEKFSNQFNYALN |
| USP7 | >sp\|Q93009\|UBP7_HUMAN Ubiquitin carboxyl-terminal hydrolase 7 |
| | OS = Homo sapiens GN = USP7 PE = 1 SV = 2 (SEQ ID NO: 386) |
| | MNHQQQQQQQKAGEQQLSEPEDMEMEAGDTDDPPRITQNPVINGNVALSDGHNTAEEDME |
| | DDTSWRSEATFQFTVERFSRLSESVLSPPCFVRNLPWKIMVMPRFYPDRPHQKSVGFFLQ |
| | CNAESDSTSWSCHAQAVLKIINYRDDEKSFSRRISHLFFHKENDWCFSNFMAWSEVIDPE |
| | KGFIDDDKVTFEVFVQADAPHGVAWDSKKHTGYVGLKNQGATCYMNSLLQTLFFTNQLRK |
| | AVYMMPTEGDDSSKSVPLALQRVFYELQHSDKPVGIKKLIKSFGWEILDSFMQHDVQELC |
| | RVLLDNVENKMKGTCVEGTIPKLFRGKMVSYIQCKEVDYRSDRREDYYDIQLSIKGKKNI |
| | FESFVDYVAVEQLDGDNKYDAGEHGLQEAEKGVKFLTLPPVLHLQLMRFMYDPQTDQNIK |
| | INDRFEFPEQLPLDEFLQKTDPKDPANYILHAVLVHSGDNHGGHYVVYLNPKGDGKWCKF |
| | DDDVVSRCTKEEAIEHNYGGHDDDLSVRHCTNAYMLVYIRESKLSEVLQAVTDHDIPQQL |
| | VERLQEEKRIEAQKRKERQEAHLYMQVQIVAEDQFCGHQGNDMYDEEKVKYTVFKVLKNS |
| | SLAEFVQSLSQTMGFPQDQIRLWPMQARSNGTKRPAMLDNEADGNKTMIELSDNENPWTI |
| | FLETVDPELAASGATLPKFDKDHDVMLFLKMYDPKTRSLNYCGHIYTPISCKIRDLLPVM |
| | CDRAGFIQDTSLILYEEVKPNLTERIQDYDVSLDKALDELMDGDIIVFQKDDPENDNSEL |
| | PTAKEYFRDLYHRVDVIFCDKTIPNDPGFVVTLSNRMNYFQVAKTVAQRLNTDPMLLQFF |
| | KSQGYRDGPGNPLRHNYEGTLRDLLQFFKPRQPKKLYYQQLKMKITDFENRRSFKCIWLN |
| | SQFREEEITLYPDKHGCVRDLLEECKKAVELGEKASGKLRLLEIVSYKIIGVHQEDELLE |
| | CLSPATSRTFRIEEIPLDQVDIDKENEMLVTVAHFHKEVFGTFGIPFLLRIHQGEHFREV |
| | MKRIQSLLDIQEKEFEKFKFAIVMMGRHQYINEDEYEVNLKDFEPQPGNMSHPRPWLGLD |
| | HFNKAPKRSRYTYLEKAIKIHN |
| | >sp\|Q93009-3\|UBP7_HUMAN Isoform 3 of Ubiquitin carboxyl-terminal |
| | hydrolase 7 OS = Homo sapiens GN = USP7 (SEQ ID NO: 2237) |
| | MAGNHRLGLEAGDTDDPPRITQNPVINGNVALSDGHNTAEEDMEDDTSWRSEATFQFTVE |
| | RFSRLSESVLSPPCFVRNLPWKIMVMPRFYPDRPHQKSVGFFLQCNAESDSTSWSCHAQA |
| | VLKIINYRDDEKSFSRRISHLFFHKENDWGFSNFMAWSEVIDPEKGFIDDDKVIFEVFVQ |
| | ADAPHGVAWDSKKHIGYVGLKNQGATCYMNSLLQTLFFINQLRKAVYMMPTEGDDSSKSV |
| | PLALQRVFYELQHSDKPVGTKKLTKSFGWETLDSFMQHDVQELCRVLLDNVENKMKGTCV |
| | EGTIPKLFRGKMVSYIQCKEVDYRSDRREDYYDIQLSIKGKKNIFESFVDYVAVEQLDGD |
| | NKYDAGEHGLQEAEKGVKFLTLPPVLHLQLMRFMYDPQTDQNIKINDRFEFPEQLPLDEF |
| | LQKTDPKDPANYILHAVLVHSGDNHGGHYVVYLNPKGDGKWCKFDDDVVSRCTKEEAIEH |
| | NYGGHDDDLSVRHCTNAYMLVYIRESKLSEVLQAVTDHDIPQQLVERLQEEKRIEAQKRK |
| | ERQEAHLYMQVQIVAEDQFCGHQGNDMYDEEKVKYTVFKVLKNSSLAEFVQSLSQTMGFP |
| | QDQIRLWPMQARSNGTKRPAMLDNEADGNKTMIELSDNENPWTIFLETVDPELAASGAIL |
| | PKFDKDHDVMLFLKMYDPKTRSLNYCGHIYTPISCKIRDLLPVMCDRAGFIQDTSLILYE |
| | EVKPNLTERIQDYDVSLDKALDELMDGDIIVFQKDDPENDNSELPTAKEYFRDLYHRVDV |
| | IFCDKTIPNDPGFVVILSNRMNYFQVAKTVAQRLNIDPMLLQFFKSQGYRDGPGNPLRHN |
| | YEGTLRDLLQFFKPRQPKKLYYQQLKMKITDFENRRSFKCIWLNSQFREEEITLYPDKHG |
| | CVRDLLEECKKAVELGEKASGKLRLLEIVSYKIIGVHQEDELLECLSPATSRTFRIEEIP |
| | LDQVDIDKENEMLVTVAHFHKEVFGTFGIPFLLRIHQGEHFREVMKRIQSLLDIQEKEFE |
| | KFKFAIVMMGRHQYINEDEYEVNLKDFEPQPGNMSHPRPWLGLDHFNKAPKRSRYTYLEK |
| | AIKIHN |
| CETN2 | >sp\|P41208\|CETN2_HUMAN Centrin-2 OS = Homo sapiens GN = CETN2 |
| | PE = 1 SV = 1 (SEQ ID NO: 2238) |
| | MASNFKKANMASSSQRKRMSPKPELTEEQKQEIREAFDLFDADGTGTIDVKELKVAMRAL |
| | GFEPKKEEIKKMISEIDKEGTGKMNFGDFLTVMTQKMSEKDTKEEILKAFKLFDDDETGK |
| | ISFKNLKRVAKELGENLTDEELQEMIDEADRDGDGEVSEQEFLRIMKKTSLY |
| RAD23B | >sp\|P54727\|RD23B_HUMAN UV excision repair protein RAD23 homolog B |
| | OS = Homo sapiens GN = RAD23B PE = 1 SV = 1 (SEQ ID NO: 2239) |
| | MQVTLKTLQQQTFKIDIDPEETVKALKEKIESEKGKDAFPVAGQKLIYAGKILNDDTALK |
| | EYKIDEKNFVVVMVIKPKAVSTPAPATTQQSAPASTTAVISSITTIVAQAPTPVPALAPT |
| | STPASITPASATASSEPAPASAAKQEKPAEKPAETPVATSPTATDSTSGDSSRSNLFEDA |
| | TSALVTGQSYENMVTEIMSMGYEREQVIAALRASFNNPDRAVEYLLMGIPGDRESQAVVD |
| | PPQAASTGAPQSSAVAAAAATTTATTTTTSSGGHPLEFLRNQPQFQQMRQIIQQNPSLLP |
| | ALLQQIGRENPQLLQQISQHQEHFIQMLNEPVQEAGGQGGGGGGGSGGIAEAGSGHMNYI |
| | QVTPQEKEAIERLKALGFPEGLVIQAYFACEKNENLAANFLLQQNFDED |
| | >sp\|P54727-2\|RD23B_HUMAN Isoform 2 of UV excision repair protein |
| | RAD23 homolog B OS = Homo sapiens GN = RAD23B (SEQ ID NO: 2240) |
| | MVTKPKAVSTPAPATTQQSAPASTTAVTSSTTTTVAQAPTPVPALAPTSTPASITPASAT |
| | ASSEPAPASAAKQEKPAEKPAETPVATSPTATDSTSGDSSRSNLFEDATSALVTGQSYEN |
| | MVTEIMSMGYEREQVIAALRASFNNPDRAVEYLLMGIPGDRESQAVVDPPQAASTGAPQS |
| | SAVAAAAATTTATTTTTSSGGHPLEFLRNQPQFQQMRQIIQQNPSLLPALLQQIGRENPQ |
| | LLQQISQHQEHFIQMLNEPVQEAGGQGGGGGGGSGGIAEAGSGHMNYIQVTPQEKEATER |
| | LKALGFPEGLVIQAYFACEKNENLAANFLLQQNFDED |
| UV-DDB | >sp\|Q92466\|DDB2_HUMAN DNA damage-binding protein 2 OS = Homo sapiens |
| | GN = DDB2 PE = 1 SV = 1 (SEQ ID NO: 2241) |
| | MAPKKRPETQKTSEIVLRPRNKRSRSPLELEPEAKKLCAKGSGPSRRCDSDCLWVGLAGP |
| | QILPPCRSIVRTLHQHKLGRASWPSVQQGLQQSFLHTLDSYRILQKAAPFDRRATSLAWH |
| | PTHPSTVAVGSKGGDIMLWNFGIKDKPTFIKGIGAGGSITGLKFNPLNTNQFYASSMEGT |
| | TRLQDFKGNILRVFASSDTINIWFCSLDVSASSRMVVTGDNVGNVILLNMDGKELWNLRM |
| | HKKKVTHVALNPCCDWFLATASVDQTVKIWDLRQVRGKASFLYSLPHRHPVNAACFSPDG |
| | ARLLTTDQKSEIRVYSASQWDCPLGLIPHPHRHFQHLTPIKAAWHPRYNLIVVGRYPDPN |
| | FKSCTPYELRTIDVFDGNSGKMMCQLYDPESSGISSLNEFNPMGDTLASAMGYHILIWSQ |
| | EEARTRK |
| | >sp\|Q92466-2\|DDB2_HUMAN Isoform D1 of DNA damage-binding protein 2 |
| | OS = Homo sapiens GN = DDB2 (SEQ ID NO: 2242) |
| | MAPKKRPETQKTSEIVLRPRNKRSRSPLELEPEAKKLCAKGSGPSRRCDSDCLWVGLAGP |
| | QILPPCRSIVRTLHQHKLGRASWPSVQQGLQQSFLHTLDSYRILQKAAPFDRRATSLAWH |
| | PTHPSTVAVGSKGGDIMLWNFGIKDKPTFIKGAAWHPRYNLIVVGRYPDPNFKSCTPYEL |
| | RTIDVFDGNSGKMMCQLYDPESSGISSLNEFNPMGDTLASAMGYHILIWSQEEARTRK |
| | >sp\|Q92466-3\|DDB2_HUMAN Isoform D2 of DNA damage-binding protein 2 |
| | OS = Homo sapiens GN = DDB2 (SEQ ID NO: 2243) |
| | MAPKKRPETQKTSEIVLRPRNKRSRSPLELEPEAKKLCAKGSGPSRRCDSDCLWVGLAGP |
| | QILPPCRSIVRTLHQHKLGRASWPSVQQGLQQSFLHTLDSYRILQKAAPFDRRATSLAWH |
| | PTHPSTVAVGSKGGDIMLWNFGIKDKPTFIKGHLVL |
| | >sp\|Q92466-4\|DDB2_HUMAN Isoform D3 of DNA damage-binding protein 2 |
| | OS = Homo sapiens GN = DDB2 (SEQ ID NO: 2244) |
| | MAPKKRPETQKTSEIVLRPRNKRSRSPLELEPEAKKLCAKGSGPSRRCDSDCLWVGLAGP |
| | QILPPCRSIVRTLHQHKLGRASWPSVQQIGAGGSITGLKFNPLNTNQFYASSMEGTTRLQ |
| | DFKGNILRVFASSDTINIWFCSLDVSASSRMVVTGDNVGNVILLNMDGKELWNLRMHKKK |
| | VTHVALNPCCDWFLATASVDQTVKIWDLRQVRGKASFLYSLPHRHPVNAACFSPDGARLL |
| | TTDQKSEIRVYSASQWDCPLGLIPHPHRHFQHLTPIKAAWHPRYNLIVVGRYPDPNFKSC |
| | TPYELRTIDVFDGNSGKMMCQLYDPESSGISSLNEFNPMGDTLASAMGYHILIWSQEEAR |
| | TRK |
| | >sp\|Q92466-5\|DDB2_HUMAN Isoform D4 of DNA damage-binding protein 2 |
| | OS = Homo sapiens GN = DDB2 (SEQ ID NO: 2245) |
| | MAPKKRPETQKTSEIVLRPRNKRSRSPLELEPEAKKLCAKGSGPSRRCDSDCLWVGLAGP |
| | QILPPCRSIVRTLHQHKLGRASWPSVQQGLQQSFLHTLDSYRILQKAAPFDRRATSLAWH |
| | PTHPSTVAVGSKGGDIMLWNFGIKDKPTFIKGIGAGGSITGLKFNPLNTNQFYASSMEGT |
| | TRLQDFKGNILRVFASSDTINIWFCSLDVSASSRMVVTGDNVGNVILLNMDGKELVSVPM |
| | EPGS |
| CAK subcomplex | — |
| RPA | — |
| PCNA | VI.13 |

[1401] More specifically, in some embodiments, the down-regulator of the NER pathway may be an inhibitor of (e.g., an siRNA against) one or more factors of Table VI.18, or any combination thereof. Inhibitors of some of the proteins of Table VI.18 above are listed elsewhere in this specification.

### VI.10 Other Pathways

[1402] Several other DNA repair pathways exist in mammals. A dedicated pathway called the ICL repair pathway repairs interstrand crosslinks. ICL repair can involve the following factors: XPF and RAD51C. Translesion synthesis (TLS) is a pathway for repairing a single strand break left after a defective replication event. Error-free postreplication repair (PRR) is another pathway for repairing a single strand break left after a defective replication event.

[1403] In some embodiments, the methods herein do not substantially inhibit one or more of, e.g., all of, ICL repair, TLS, and PRR.

### VI.11 The Role of Epigtentic Modification in DNA Repair

[1404] Breaks, e.g., DSBs, are characterized by distinct chromatin structure. This chromatin structure affects DNA repair.

[1405] In some embodiments, HDR repair is promoted by modulating the chromatin structure at the site of the DNA lesion. For example, in some embodiments, a Cas9 molecule and gRNA can induce a DSB in a desired location during G2 or another phase of the cycle. This DSB can be formed using, e.g., one Cas9 molecule with the ability to produce DSBs, or two nickases. In S/G2, a chromatin structure modulator can increase the likelihood that a DSB is repaired by HDR. A template nucleic acid can be added to the cell, so that the HDR machinery repairs the DSB using the template nucleic acid.

[1406] Upon formation of a double strand break, ATM and MDC1 (which can activate canonical NHEJ and HDR) allow recruitment of gamma-H2AX, a specialized histone, to a 1-2 megabase region surrounding the break. When no damage is detected, gamma-H2AX is kept in an inactive, phosphorylated state by the kinase WSTF. Upon damage sensing, EYA1 and EYA2 dephosphorylate and activate gamma-H2AX. Once gamma-H2AX is recruited to the break, it promotes repair via a number of DNA repair factors.

[1407] For instance, gamma-H2AX helps to prolong the association of NBS1, BRCA1, and 53BP1 at DSB regions (after their initial recruitment by PARP1). This effect may be mediated through a host of chromatin modifying enzymes including INO80 (to remove nucleosomes) and SWI/SNF (to relax the chromatin). MCPH1 may assist gamma-H2AX in stabilizing SWI/SNF association near the damage site.

[1408] Another chromatin modification at DNA damage sites is ubiquitination of K63 of H2A and gamma-H2AX. Ubiquitination (mono- or poly-ubiquitination) of K63 is performed by the ubiquitin ligase RNF8, which in turn recruits the BRCA1-A complex. This complex also has ubiquitin ligase activity (due to the BRE subunit, the BRCC36 subunit, and NAB1).

[1409] Sumoylation is another important modification of proteins near the break site, because it promotes association of BRCA1-A complex. PIAS1, a SUMO ligase, catalyzes sumoylation of BRCA1 to stimulate its ubiquitin ligase activity. PIAS4, another SUMO ligase, catalyzes sumoylation of 53BP1.

[1410] Sometimes a combination of histone modifications is required to recruit a factor. For example, 53BP1 contains Tudor domains that bind to mono- and dimethylated H4K20 and acetylated H4K16, as well as a motif that binds to ubiquitinylated H2AK15. Although methylated H2K20 is abundant in the genome, in the absence of DNA damage it is masked by JMJD2A (also referred to as KDM4A). The masking proteins are removed from damaged regions, allowing the recruitment of 53BP1. As to the H4K16 acetylation, this seems to be provided by HDAC1 and HDAC2, making these proteins promoters of the canonical NHEJ pathway.

[1411] Sites of DNA damage or lesions become enriched in histone methyltransferases complexes (e.g., polycomb proteins, histone deacetylases such as HDACs and sirtuins, and DNA methyltransferases).

[1412] DNA repair in heterochromatin requires loosening the tightly packed chromatin. When DNA is damaged, CHK2 phosphorylates HP1, causing HP1 to disassociate it from its usual position on the methylated K9 of histone H3. Further relaxation of the chromatin occurs when TIP60 (KAT5) acetylates H3, H4, and gamma-H2AX. Tip60 is recruited to double strand breaks and inhibits 53BP1 association. KAP1 also localizes to damaged heterochromatin, where it promotes chromatin relaxation. Another repair factor that localizes to damaged heterochromatin is EXPAND1, a chromatin remodeling factor that deconsenses chromatin. EXPAND1 is recruited to DSBs in a 53BP1-dependent manner.

[1413] Accordingly, in some embodiments, the methods herein involve modifying chromatin in order to promote HDR (e.g., HR, SSA or alt-HR). For instance, the methods may involve modulating, e.g., inhibiting, a chromatin-modifying factor (e.g., exactly one factor, or one or more factors). More specifically, the methods may involve modulating, e.g., inhibiting, exactly one of, or one or more of gamma-H2AX, WSTF, EYA1, EYA2, INO80, SWI/SNF, MCPH1, a ubiquitin ligase, RNF8, BRCA1, BRCA1-A, a SUMO ligase, PIAS1, JMJD2A, a histone deacetylase, HDAC1, HDAC2, CHK2, TIP60, KAP1, EXPAND1, or a component of Table VI.1(I), or any combination thereof. In some embodiments, the methods involve promoting HDR by inhibiting exactly one of, or one or more of MDC1, HDAC1, HDAC2. Up-regulation of HDR, in some embodiments, is achieved using siRNA directed against one or more of gamma-H2AX, WSTF, EYA1, EYA2, INO80, SWI/SNF, MCPH1, a ubiquitin ligase, RNF8, BRCA1, BRCA1-A, a SUMO ligase, PIAS1, JMJD2A, a histone deacetylase, HDAC1, HDAC2, CHK2, TIP60, KAP1, EXPAND1, or a component of Table VI.1(I), or any combination thereof. In some embodiments, a chromatin-modifying factor is down regulated using an HDR-enhancing gRNA that targets a chromatin-modifying factor, e.g., one or more of the components listed in Table VI.18 (e.g., one or more of gamma-H2AX, WSTF, EYA1, EYA2, INO80, SWI/SNF, MCPH1, a ubiquitin ligase, RNF8, BRCA1, BRCA1-A, a SUMO ligase, PIAS1, JMJD2A, a histone deacetylase, HDAC1, HDAC2, CHK2, TIP60, KAP1, EXPAND1, or a component of Table VI.1(I), or any combination thereof). In some embodiments, the HDR-enhancing gRNA is used in combination with an eiCas9 molecule. In some embodiments, the HDR-enhancing gRNA is used in combination with an eaCas9 molecule. In some embodiments, the HDR-enhancing gRNA is administered to the cell as a HDR-enhancing gRNA:Cas9 molecule complex.

[1414] In some embodiments, modifying the chromatin results in substantial inhibition of only DNA damage repair pathway e.g., exactly one of HDR, alt-HR, anti-HR, NHEJ, alt-NHEJ, MMEJ, SSBR, or SSA.

[1415] More specifically, in some embodiments, the chromatin structure modifier is an EZH2 inhibitor e.g., EPZ-6438 or an HDAC inhibitor e.g., TCA, or any combination thereof. In some embodiments, the EZH2 inhibitor modifies, e.g., inhibits, histone H3 trimethylation of residue K27. In some embodiments, the HDAC inhibitor modifies, e.g., promotes, histone H4 acetylation at residue K16. In some embodiments, an HDAC inhibitor does not interfere with HDR, e.g., the HDAC inhibitor does not interfere with recruitment of factors that promote HDR.

TABLE VII
HDR-enhancers that are chromatin structure modifiers

| 1. EZH2 | | |
|---|---|---|
| Compounds | Phase | Structure |
| GSK343 | | [chemical structure] |
| EPZ-6438 | Phase I/II | [chemical structure] |
| GSK2816126 | Phase I | |
| SureCN6120847 | | [chemical structure] |
| EPZ005687 | | [chemical structure] |

| | |
|---|---|
| siRNAs | Accell Human EZH2 siRNA, sold by Dharmacon; |
| | EZH2 Silencer, sold by Life Technologies |
| antibodies | EZH2 monoclonal antibody (M07), clone 1D11, sold by Abnova |
| | Ezh2 Antibody, sold by Cell Signaling Technology |
| 2. HDAC-HDACI & II inhibitors | |
| Compounds | |
| Trichostatin A (TSA) | |
| Sodium Butyrate (NaB) | |
| siRNA | |
| HDAC1 | CAGCGACUGUUUGAGAACC (sense) (SEQ ID NO: 2246) |
| | CUAAUGAGCUUCCAUACAA (sense) (SEQ ID NO: 2247) |
| HDAC2 | Accell Human HDAC2 siRNA, sold by Dharmacon; |
| | HDAC2 Silencer, sold by Life Technologies; |
| | GCGGAUAGCUUGUGAUGAA (sense); (SEQ ID NO: 2248) |
| | GCAAAGAAAGCUAGAAUUG (sense) (SEQ ID NO: 2249) |
| antibodies | |
| HDAC2 | HDAC2 Antibody, sold by Cell Signalling Technology |
| | HDAC2 Antibody, sold by Novus Biologicals |
| 3. Histone Demethylation | |
| KDM4A/JMJD2A | |
| siRNA | Commercially available from Dharmacon or Ambion |
| 3. Histone Methylation | |
| Setd2 | |
| siRNA | Commercially available from Dharmacon or Ambion |

[1416] In some embodiments, one or more of HDR, alt-HR, anti-HR, NHEJ, MMEJ, SSA, SSBR, MMR, NER, and BER are not substantially down-regulated. In some embodiments, only one DNA damage repair pathway is down-regulated.

### VI.12 Additional Considerations in Selecting an HDR-Enhancer

[1417] In some embodiments, even though a component is typically recognized as participating in two pathways, it is possible to inhibit that component, resulting in inhibition of only one of the pathways. For example, in some embodiments, a component promotes a first pathway and inhibits a second pathway. In this embodiment, an inhibitor of the component would inhibit the first pathway but not the second. As a second example, in some embodiments, if a component is essential to a first pathway but redundant to a second pathway, inhibiting the component would inhibit the first pathway but not the second. As a third example, in some embodiments, a component may have a first activity that promotes a first pathway and a second activity that promotes a second pathway. In this embodiment, an inhibitor of the component's first activity would inhibit the first pathway but not the second. As a fourth example, in some embodiments, a component might act in a first pathway and a second pathway, and a low dose of an inhibitor inhibits the first pathway, and a higher dose of the inhibitor is necessary to inhibit the second pathway.

[1418] In some cases, the HDR-enhancer molecule is an antibody. Several commercially available antibodies for use in the methods disclosed herein are known in the art. It is understood that when using an antibody, and especially when administering the antibody to a human patient, one can use an antibody designed to minimize the patient's immune response against the antibody. For instance, a human antibody or a humanized antibody can be used. Methods of designing humanized antibodies are known in the art. It is also understood that one can use an antibody, or an antigen binding fragment thereof, that comprises CDRs (e.g., one or more of, e.g., all of CDRs HCDR1, HCDR2, HCDR3, LCDR1, LCDR2, and LCDR3, using the Kabat or Chothia definitions of CDRs) of an antibody described herein. The antibody can be, e.g., polyclonal or monoclonal, or an antigen binding portion thereof. The antibody can be, e.g., an IgG, IgM, IgA, IgD, or IgE molecule or an antigen-binding portion thereof. The antigen-binding portion may comprise a Fab, a F(ab′)2, Fv, disulfide-linked F, scFv, single domain antibody, closed conformation multispecific antibody, disulfide-linked dscFV, or diabody. The antibody may be created by any suitable system; for example, it may be isolated from the serum of an animal, produced in a cell e.g., a hybridoma, a yeast cell, or a bacterial cell.

[1419] In some embodiments, the antibody is an intrabody. An intrabody is an antibody that can bind to an intracellular protein. To achieve intracellular localization, the introbody may comprise one or more localization moieties, e.g., a nuclear localization signal (NLS). In some embodiments the intrabody is produced in the cell that is its intended destination, e.g., the cell comprising the target nucleic acid to be edited. In other embodiments, the intrabody is produced in a host cell, e.g., a cultured cell, e.g., a mammalian, eukaryotic, or bacterial cell. In some embodiments, the intrabody comprises an scFv.

[1420] In some embodiments, the HDR-enhancer molecule is an siRNA. It is understood that when using a siRNA, and especially when administering the siRNA to a human patient, one can use a siRNA designed to promote the stability of the siRNA, for example by using chemically modified siRNA. Numerous modifications are known and are discussed in more detail in Section X herein. For instance, the siRNA may comprise one or more modified bases, modifications to the backbone, and/or moieties conjugated to the nucleic acid.

[1421] In some embodiments, the HDR-enhancer molecule is an HDR-enhancing gRNA. In some embodiments, the HDR-enhancing gRNA is used in combination with an eiCas9 molecule. In some embodiments, when the HDR-enhancing gRNA is used in combination with an eiCas9, the eiCas9 molecule will temporarily or transiently prevent and/or reduce transcription of the targeted gene in the cell, as compared to the level of transcription of the targeted gene in a cell that does not comprise the HDR-enhancing gRNA and eiCas9 molecule. Temporary inhibition of the targeted gene will allow the other Cas9 system to target the gene of interest and promote the repair of the target DNA via an HDR pathway, e.g., anti-HR, HR, and/or SSA. In some embodiments, the HDR-enhancing gRNA is used in combination with an eaCas9 molecule. In some embodiments, the HDR-enhancing gRNA is administered to the cell as a HDR-enhancing gRNA:Cas9 molecule complex.

[1422] In some embodiments, the HDR-enhancer molecule is an anti-MiR. An anti-MiR is an antisense nucleic acid that is capable of inhibiting a microRNA. In some embodiments, an anti-MiR is 100% complementary to the microRNA it targets, or a portion thereof. The anti-MiR may comprise RNA, and may comprise chemical modifications.

[1423] In some embodiments, HDR-enhancer has at least 60, 70, 80, 81, 82, 83, 84, 85, 86, 87, 88, 89, 90, 91, 92, 93, 94, 95, 97, 98, 99 or 100% homology with, or differs by no more than 50, 40, 30, 20, 15, 14, 13, 12, 11, 10, 9, 8, 7, 6, 5, 4, 3, 2, or 1, amino acid residues from a naturally occurring protein described herein, e.g., a protein of any of Tables VI.1, VI.2, VI.4, VI.7, VI.9, VI.11, VI.13, VI.15, VI.17, and VI.18.

[1424] In some embodiments, the DNA damage response (DDR) pathway is not modulated. For example, in some embodiments, levels and activity of ATM, ATR, CHK1, and CHK2 are not altered. While not wishing to be bound by theory, in some embodiments leaving these components unaltered avoids certain side-effects.

[1425] In some embodiments, the HDR-enhancer modulates, e.g., inhibits, one or more of: ABL1, ATM, ATR, AURKB, BACH1, BARD1, BCCIP, BLM, BRCA2, BRCC3, BRE, BUB1B, C11orf30, CCNA2, CDC45, CDK1, CDK2, CDK4, CHEK1, CHEK2, DMC1, ECD, FANCD2, FANCE, FANCG, FANCI, FLNA, FYN, GRB2, H2AFX, HDAC1, HDAC2, HMG20B, KAT2B, KIF4A, LMNA, MCPH1, MGMT, MLH1, MLH3, MND1, MORF4L1, MRE11A, MSH4, MTA2, PALB2, PCNA, PDS5B, PLK1, PMS1, PMS2, PSMC3IP, PSMD3, PSMD6, RAD21, RAD23A, RAD50, RAD51, RAD51B, RAD51C, RBBP8, RPA1, RPA2, RPA3, SERPINH1, SHFM1, SIRT1, SIRT2, SKP2, SMAD1, SMAD2, SMAD3, SMC3, SP1, SPO11, STAT5A, SYCP3, TEX15, TOP3A, TP53, UBC, UQCC1, USP11, WDR16, and XRCC3.

[1426] In some embodiments, the HDR-enhancer does not modulate, e.g., does not inhibit, one or more of: ABL1, ATM, ATR, AURKB, BACH1, BARD1, BCCIP, BLM, BRCA2, BRCC3, BRE, BUB1B, C11orf30, CCNA2, CDC45, CDK1, CDK2, CDK4, CHEK1, CHEK2, DMC1, ECD, FANCD2, FANCE, FANCG, FANCI, FLNA, FYN, GRB2, H2AFX, HDAC1, HDAC2, HMG20B, KAT2B, KIF4A, LMNA, MCPH1, MGMT, MLH1, MLH3, MND1, MORF4L1, MRE11A, MSH4, MTA2, PALB2, PCNA, PDS5B, PLK1, PMS1, PMS2, PSMC3IP, PSMD3, PSMD6, RAD21, RAD23A, RAD50, RAD51, RAD51B, RAD51C, RBBP8, RPA1, RPA2, RPA3, SERPINHI, SHFM1, SIRT1, SIRT2, SKP2, SMAD1, SMAD2, SMAD3, SMC3, SP1, SPO11, STAT5A, SYCP3, TEX15, TOP3A, TP53, UBC, UQCC1, USP11, WDR16, and XRCC3.

### VI.13 Promoting HDR by Modulating the Cell Cycle

[1427] Since the HDR machinery is active during G2, in some aspects, the present disclosure provides methods of promoting HDR by increasing the proportion of cells in G2, e.g., by administering an agent that arrests cells in G2. In some embodiments, this agent induces reversible cell cycle arrest, so that cells can divide normally once the inhibitor is no longer effective. The agent may be, e.g., an inhibitor of a cyclin-dependent kinase, e.g., an inhibitor of CDK1. Inhibition of Cdk1 can arrest reversibly cells at the G2/M boundary. Exemplary cell cycle arrest agents are provided in Table VIII below.

TABLE VI.20
Cell cycle arrest agents.
1. Cdk1

| Compounds | Reference(s) |
|---|---|
| RO-3306 | Vassilev et al. (2006) PROC. NAT'L. ACAD. SCI. USA |
| | 103(28): 10660-5. |
| AZD 5438 | Camidge et al. (2006) Cancer Chemother. Pharmacol. |
| | 60(4): 479-88. |

[1428] In some embodiments, a cell is treated with a cell cycle arrest agent in combination with another HDR-enhancer, e.g., an HDR-enhancer as described in one or more of Sections VI.1 through VI.13 above.

### VII. Creating Mutations, e.g., Deletions, by Promoting Error-Prone DNA Repair

[1429] The present disclosure provides, e.g., compositions and methods for creating mutations, e.g., deletions, in a target region. In some embodiments, a mutation, e.g., deletion is created by making a Cas9-mediated break at the location where the deletion is desired, and inhibiting a DNA damage repair pathway so that the break is repaired by an error-prone pathway such as alt-NHEJ. In the wild-type context, alt-NHEJ occurs when there is a small degree of resection at the break. (When there is no resection, canonical NHEJ is favored, and when there is a large degree of resection, HDR or SSA is favored.) Accordingly, in the methods described in this section, it is often desirable to induce a short amount of resection.

[1430] Generally, in order to promote alt-NHEJ, one does not provide a template nucleic acid, because a template nucleic acid causes a cell to favor HDR over alt-NHEJ.

[1431] In some embodiments, the error-prone pathway is promoted by down-regulating HDR. Down-regulators of HDR are listed herein, e.g., in Section VI.1, e.g., in Table VI.3. In some embodiments, the methods herein involve down-regulating an HDR pathway, in the absence of a template nucleic acid, in order to promote alt-NHEJ. For instance, the methods may involve modulating, e.g., inhibiting, a component (e.g., exactly one component, or one or more components, e.g., two or three components) of an HDR pathway, e.g., a component of Table VI.1(C) or VI.2. In embodiments, HDR is down-regulated using an agent of Table VI.3. In embodiments where HDR is inhibited, this disclosure contemplates inhibiting downstream components of HDR, e.g., BRCA2 and/or RAD51. In some embodiments, BRCA1 is inhibited, in order to result in a loss of resection, to up-regulate the NHEJ pathway (see, e.g., Cotta-Ramusino et al. (2011) SCIENCE 332(6035): 1313-7). In some embodiments, upstream components of HDR, e.g., one or more pro-resection proteins, e.g., exonucleases, are not inhibited.

[1432] In some embodiments, resection is promoted by inhibiting an anti-resection protein. Down-regulators of anti-resection proteins are listed, e.g., in Section VI.4, e.g., in Table VI.8. Accordingly, in some embodiments, a cell is treated with a (e.g., exactly one, or one or more) inhibitor of an anti-resection protein.

[1433] In embodiments, resection is promoted by providing a protein that promotes resection, e.g., an exonuclease. In some embodiments, the method comprises providing (e.g., by overexpressing) MRE11, NBS1, BRCA1-C, CtIP, MRN, EXO1, BLM, or DNA2 endonuclease.

[1434] The method of creating a deletion may be used during any time that the alt-NHEJ machinery is active, e.g., in G1, S, or G2 phase.

[1435] In some embodiments, a mutation, e.g., a deletion, is created by making a Cas9-mediated break at the location where the deletion is desired, and inhibiting a DNA damage repair pathway so that the break is repaired by an error-prone pathway, e.g., C-NHEJ. While not wishing to be bound by theory, in some embodiments, inhibition of BRCA2 and Rad51 decreases other HDR pathways without perturbing resection, and therefore the SSA repair pathway becomes more dominant. (see, e.g., Cotta-Ramusino et al. (2011); and Stark et al. (2004) MOL. CELL BIOL. 24(21): 9305-16).

[1436] In some embodiments, the error prone pathway that is promoted is SSA. In some embodiments, a template nucleic acid is not provided to resolve a DNA lesion because a template nucleic acid causes a cell to favor other HDR pathways over SSA. Thus, in some embodiments, one HDR pathway is perturbed, and no template nucleic acid is provided, in order promote SSA. In addition, in some embodiments, a cell is treated with an up-regulator (e.g., exactly one up-regulator, or one or more up-regulators) of SSA. In embodiments, EPR-enhancer has at least 60, 70, 80, 81, 82, 83, 84, 85, 86, 87, 88, 89, 90, 91, 92, 93, 94, 95, 96, 97, 98, 99 or 100% homology with, or differs by no more than 50, 40, 30, 20, 15, 14, 13, 12, 11, 10, 9, 8, 7, 6, 5, 4, 3, 2, or 1, amino acid residues from a naturally occurring protein described herein, e.g., a protein of any of Table VI.11 which lists components of the SSA pathway.

[1437] In some embodiments, a cell is treated with a down-regulator (e.g., exactly one down-regulator, or one or more down-regulators) of HDR.

[1438] In some embodiments, the SDMMJ pathway is down-regulated in order to promote SSA. For instance, DNA polymerase theta (Pol Theta) can be inhibited in order to down-regulate SDMMJ. Experiments that abrogate Pol Theta expression result in larger deletions, a phenotype that resembles SSA. Accordingly, in some embodiments, a cell is treated with a down-regulator (e.g., exactly one down-regulator, or one or more down-regulators) of SDMMJ.

[1439] In one embodiment, the EPR enhancer is an siRNA. In another embodiment, the EPR enhancer is an antibody, e.g., an intrabody. In another embodiment, the EPR enhancer is an EPR-enhancing gRNA. As used herein, the term “EPR-enhancing gRNA” refers to a gRNA, which, in combination with a Cas9 molecule (e.g., an eiCas9 molecule), enhances (e.g., increases the frequency or efficiency of) error-prone repair (e.g., alt-NJEH and SSA). In some embodiments, the EPR-enhancing gRNA guides a Cas9-mediated reduction in the transcription of a gene encoding a non-error-prone DNA damage repair pathway protein. In some embodiments, the EPR-enhancing gRNA guides a Cas9-mediated cleavage event in a gene encoding a non-error-prone DNA damage repair pathway protein (e.g., a protein involved in HDR, such as HR, alt-HR, and/or SSA).

[1440] The methods in this section may be used in a variety of contexts. For example, they may be used to, e.g., inactivate a preselected gene in a model organism in order to study the gene. In addition, the methods may be used to inactivate a gene that causes disease, e.g., an oncogene or a gene of a pathogen (e.g., a viral gene that has integrated into a host cell's genome, a protease, a polymerase, a structural gene, a bacterial gene, a toxin, a cell wall synthesis gene, or a drug resistance gene).

### VIII. Target Cells

[1441] Cas9 molecules and gRNA molecules, e.g., a Cas9 molecule/gRNA molecule complex, as disclosed herein, can be used to manipulate e.g., to edit a target nucleic acid, a wide variety of cells. Additional details on types of cells that can be manipulated may be found in the section entitled “VIIA. TARGETS: CELLS” of PCT Application WO2015/048577, the entire contents of which are expressly incorporated herein by reference.

[1442] In some embodiments, a cell, or a population of cells, is manipulated by editing (e.g., introducing a mutation or correcting) one or more target genes, e.g., as described herein. In an embodiment, a cell, or a population of cells, is manipulated by editing one or more non-coding sequences, e.g., an alteration in an intron or in a 5′ or 3′ non-translated or non-transcribed region. In an embodiment, a cell is manipulated by editing the sequence of a control element, e.g., a promoter, enhancer, or a cis-acting or trans-acting control element. In an embodiment, a cell, or a population of cells, is manipulated by editing one or more coding sequences, e.g., an alteration in an exon. In some embodiments, a cell, or a population of cells, is manipulated in vitro. In other embodiments, a cell, or a population of cells, is manipulated ex vivo. In some embodiments, a cell, or a population of cells, is manipulated in vivo. In some embodiments, the expression of one or more target genes (e.g., one or more target genes described herein) is modulated, e.g., in vivo. In other embodiments, the expression of one or more target genes (e.g., one or more target genes described herein) is modulated, e.g., ex vivo. In other embodiments, the expression of one or more target genes (e.g., one or more target genes described herein) is modulated, e.g., in vitro.

[1443] In some embodiments, the cell, or population of cells, is a T cell, e.g., a CD8⁺ T cell (e.g., a CD8⁺ naïve T cell, central memory T cell, or effector memory T cell), a CD4⁺ T cell, a stem cell memory T cell, a helper T cell, a regulatory T cell, a cytotoxic T cell, a natural killer T cell, or a population of such cells.

[1444] In some embodiments, the cell, or population of cells, is a Hematopoietic Stem Cell (e.g., a long term hematopoietic stem cell (LT-HSC), a short term hematopoietic stem cell (ST-HSC), a multipotent progenitor (MPP) cell, a lineage restricted progenitor (LRP) cell (e.g., a lymphoid progenitor cell, a myeloid progenitor cell (e.g., a common myeloid progenitor (CMP) cell), an erythroid progenitor cell (e.g., a megakaryocyte erythroid progenitor (MEP) cell)), or a population of such cells.

[1445] In some embodiments, the cell, or population of cells, is a retinal cell (e.g., a photoreceptor cell (e.g., a rod cell, a cone cell) a retinal pigmented epithelium (RPE) cell), a trabecular meshwork cell, or a population of such cells.

[1446] In some embodiments, the cell, or population of cells, is a cochlear hair cell (e.g., an outer hair cell or an inner hair cell), or a population of cochlear hair cells.

[1447] In some embodiments, the cell, or population of cells, is a pulmonary epithelial cell (e.g., a bronchial epithelial cell or an alveolar epithelial cell), a pulmonary epithelial progenitor cell, or a population of such cells.

[1448] In some embodiments, the cell, or population of cells, is a striated muscle cell, a cardiac muscle cell, a muscle satellite cell, or a population of such cells.

[1449] In some embodiments, the cell, or population of cells, is a neuron, a neuronal stem cell, or a population of such cells.

[1450] In some embodiments, the cell, or population of cells, is a mesenchymal stem cell, or a population of mesenchymal stem cells.

[1451] In some embodiments, the cell, or population of cells, is an induced pluripotent stem (iPS) cell, or a population of iPs cells.

[1452] In some embodiments, the cell, or population of cells, is an embryonic stem cell, or a population of embryonic stem cells.

[1453] In some embodiments, the cell, or population of cells, is a monocyte, a megakaryocyte, a neutrophil, an eosinophil, a basophil, a mast cell, a reticulocyte, or a population of such cells.

[1454] In some embodiments, the cell, or population of cells, is a B cell, e.g., a progenitor B cell, a Pre B cell, a Pro B cell, a memory B cell, or a plasma B cell, or a population of B cells.

[1455] In some embodiments, the cell, or population of cells, is a gastrointestinal epithelial cell, a biliary epithelial cell, a pancreatic ductal epithelial cell, an intestinal stem cell, or a population of such cells.

[1456] In some embodiments, the cell, or population of cells, is a hepatocyte, a liver stellate cell, a Kupffer cell, or a population of such cells.

[1457] In some embodiments, the cell, or population of cells, is an osteoblast, an osteoclast, or a population of such cells.

[1458] In some embodiments, the cell, or population of cells, is an adipocyte, a preadipocyte, or a population of such cells.

[1459] In some embodiments, the cell, or population of cells, is a pancreatic islet cell (e.g., a beta cell, an alpha cell, or a delta cell), a pancreatic exocrine cell, or a population of such cells.

[1460] In some embodiments, the cell, or population of cells, is a Schwann cell, an oligodendrocyte, or a population of such cells.

[1461] In some embodiments, the cells are manipulated (e.g., converted or differentiated) from one cell type to another. In some embodiments, a pancreatic cell is manipulated into a beta islet cell. In some embodiments, a fibroblast is manipulated into an iPS cell. In some embodiments, a preadipocyte is manipulated into a brown fat cell. Other exemplary cells include, e.g., muscle cells, neural cells, leukocytes, and lymphocytes. In some embodiments, the cell being manipulated is selected from fibroblasts, monocytic precursors, B cells, exocrine cells, pancreatic progenitors, endocrine progenitors, hepatoblasts, myoblasts. In some embodiments, the cell is manipulated (e.g., converted or differentiated) into muscle.

[1462] In some embodiments, a nucleic acid at one or more target positions in a cell, or a population of cells, is altered e.g., as described herein. In some embodiments, a nucleic acid at one or more target positions in a cell, or a population of cells (e.g., target positions at one or more genes described herein) is altered, e.g., in vivo. In other embodiments, a nucleic acid at one or more target positions in a cell, or a population of cells (e.g., target positions at one or more genes described herein) is altered, e.g., ex vivo. The Cas9 molecule, nucleic acid template system, and/or gRNA molecules described herein can be delivered to a cell or to a population of cells.

[1463] In some embodiments, the cell, or the population of cells, is a T cell, a CD8⁺ T cell, a CD8⁺ naïve T cell, a central memory T cell, an effector memory T cell, a CD4⁺ T cell, a stem cell memory T cell, a helper T cell, a regulatory T cell, a cytotoxic T cell, a natural killer T cell, a hematopoietic stem cell, a long term hematopoietic stem cell, a short term hematopoietic stem cell, a multipotent progenitor cell, a lineage restricted progenitor cell, a lymphoid progenitor cell, a pancreatic progenitor cell, an endocrine progenitor cell, an exocrine progenitor cell, a myeloid progenitor cell, a common myeloid progenitor cell, an erythroid progenitor cell, a megakaryocyte erythroid progenitor cell, a monocytic precursor cell, an endocrine precursor cell, an exocrine cell, a fibroblast, a hepatoblast, a myoblast, a macrophage, an islet beta-cell, a cardiomyocyte, a blood cell, a ductal cell, an acinar cell, an alpha cell, a beta cell, a delta cell, a PP cell, a cholangiocyte, a retinal cell, a photoreceptor cell, a rod cell, a cone cell, a retinal pigmented epithelium cell, a trabecular meshwork cell, a cochlear hair cell, an outer hair cell, an inner hair cell, a pulmonary epithelial cell, a bronchial epithelial cell, an alveolar epithelial cell, a pulmonary epithelial progenitor cell, a striated muscle cell, a cardiac muscle cell, a muscle satellite cell, a myocyte, a neuron, a neuronal stem cell, a mesenchymal stem cell, an induced pluripotent stem (iPS) cell, an embryonic stem cell, a monocyte, a megakaryocyte, a neutrophil, an eosinophil, a basophil, a mast cell, a reticulocyte, a B cell, e.g. a progenitor B cell, a Pre B cell, a Pro B cell, a memory B cell, a plasma B cell, a gastrointestinal epithelial cell, a biliary epithelial cell, a pancreatic ductal epithelial cell, an intestinal stem cell, a hepatocyte, a liver stellate cell, a Kupffer cell, an osteoblast, an osteoclast, an adipocyte (e.g., a brown adipocyte, or a white adipocyte), a preadipocyte, a pancreatic precursor cell, a pancreatic islet cell, a pancreatic beta cell, a pancreatic alpha cell, a pancreatic delta cell, a pancreatic exocrine cell, a Schwann cell, or an oligodendrocyte, or a population of such cells.

[1464] In some embodiments, the cell, or the population of cells, is a mammalian cell, e.g., a human cell, a mouse cell, a rat cell, a sheep cell, a cow cell, a pig cell, a horse cell, a goat cell, a dog cell or a cat cell, or a population of mammalian cells. In one embodiment, the cell is a human cell.

[1465] In an embodiment, the cell, or population of cells, is manipulated ex vivo by altering a nucleic acid at one or more target positions, and administered to a subject. A cell, or population of cells, to be altered according to the methods disclosed herein, may include a stem cell such as, by way of example, an embryonic stem cell, an induced pluripotent stem cell or a neuronal stem cell, or a population of such cells. In an embodiment, the cell, or population of cells, is an induced pluripotent stem (iPS) cell or a cell derived from an iPS cell, or a population of such cells, altered to correct a mutation and differentiated into a clinically relevant cell, or population of cells.

[1466] In some embodiments, the cell is a cell from a disease-causing organism, e.g., a bacterium, fungus, protozoan, or parasite. In some embodiments, the cell is a cell infected with a disease-causing organism (e.g., a virus, fungus, protozoan, or parasite).

[1467] In some embodiments, the cell is situated in the body of a subject. In such instances, the cell might be the subject's own cells or might be a cell of a disease-causing organism. In this case, a gRNA molecule, a Cas9 molecule, and a nucleic acid template system, may be administered to the subject as pharmaceutical compositions. In some embodiments, the subject is a mammal, e.g., a human, a farm animal (e.g., a cow, a pig, a horse, or a goat), or a companion animal (e.g., a dog or a cat).

[1468] In some embodiments, the subject suffers from a disease caused by a target position in a nucleic acid, e.g., a particular mutation, of a cell, or population of cells.

[1469] In some embodiments, the cell, or population of cells, is a diseased or mutant-bearing cell, or population of cells. Such cells can be altered to treat the disease, e.g., to correct a mutation, or to alter the phenotype of the cell, or population of cells, e.g., to inhibit the growth of a cancer cell or a population of cancer cells, e.g., a tumor. For example, a cell, or a population of cells, is associated with one or more diseases or conditions describe herein. In some embodiments, the cell is a cancer stem cell. For example, cancer stem cells can be manipulated by modulating the expression of one or more genes selected from TWIST (TF), HIF-1 alpha, HER2/neu, Snail (TF), or Wnt. In some embodiments, the cancer cell is selected from lung cancer cells, breast cancer cells, skin cancer cells, brain cancer cells, pancreatic cancer cells, hematopoietic cancer cells, liver cancer cells, kidney cancer cells, and ovarian cancer cells.

[1470] In some embodiments, the cell is characterized by a disorder caused by aberrant mtDNA. This disorder may be, e.g., a mtDNA depletion syndrome (e.g., Alpers or early infantile hepatocerebral syndromes) or a mtDNA deletion disorder (e.g., progressive external ophthalmoplegia (PEO), ataxia-neuropathy, or mitochondrial neurogastrointestinal encephalomyopathy (MNGIE)).

[1471] In some embodiments, the cell, or population of cells, is a normal cell or a population of normal cells.

[1472] In some embodiments, the cell, or population of cells, is a stem cell or a progenitor cell (e.g., iPS, embryonic, hematopoietic, adipose, germline, lung, or neural stem or progenitor cells), or a population of such cells.

[1473] The cells may also be treated at a time when they are not situated in the body of a subject. In some embodiments, a cell, or a population of cells, is treated ex vivo to avoid exposing a patient to an agent or agents that cause undesirable side effects. In some embodiments, treating cells ex vivo allows a user to select a sub-population of cells to administer to the patient. The sub-population may be, e.g., cells having a nucleic acid that was successfully altered, or cells having a desired phenotype, such as minimal undesired alterations to DNA, or a phenotype that indicates the nucleic acid was successfully altered.

[1474] In some embodiments, the cell, or population of cells, is not situated in a subject's body and the cell, or population of cells, is modified for research or manufacturing purposes. In some embodiments, the cell, or population of cells, is suitable for producing a recombinant biological product. For example, the cell, or population of cells, can be a CHO cell or a fibroblast. In one embodiment, the cell, or population of cells, is a cell, or population of cells, that has been engineered to express a protein.

[1475] In some embodiments, the cell, or population of cells, is not actively dividing. In some embodiments, the cell is in in G0 phase (which is sometimes viewed as a prolonged G1 phase), is quiescent, or is senescent. In some embodiments, the population of cells are in G0 phase, are quiescent, or are senescent. In some embodiment, the quiescent cell can be a terminally differentiated cell. In some embodiments, the quiescent cell can be a neuron, a muscle cell, e.g., a cardiac muscle cell, a parenchymal cell e.g., a parenchymal liver or kidney cell, a hematopoietic cell e.g., a hematopoetic stem cell, a fibroblast, a stem cell e.g., an adult stem cell, a hepatic cell e.g., a hepatic stellate cell, an immune cell e.g., a T cell or B cell, or an epithelial cell. In some embodiments, the senescent cell may have shortened telomeres relative to an actively dividing cell, e.g., its telomeres may be of a length that triggers a halt in the cell cycle.

[1476] In some embodiments, the cell, or population of cells, is characterized by a disorder caused by aberrant mtDNA. This disorder may be, e.g., a mtDNA depletion syndrome (e.g., Alpers or early infantile hepatocerebral syndromes) or mtDNA deletion disorder (e.g., progressive external ophthalmoplegia (PEO), ataxia-neuropathy, or mitochondrial neurogastrointestinal encephalomyopathy (MNGIE)).

[1477] In some embodiments, the cell, or population of cells, is actively dividing. In some embodiments, the cell is in G2 phase. In some embodiments, the population of cells comprises cells that are in G2 phase. In some embodiments, the cell is in G1 phase. In some embodiments, the population of cells comprises cells that are in G1 phase. In some embodiments, the cell is in S phase. In some embodiments, the population of cells comprises cells that are in S phase.

[1478] The technology described herein can be used to edit numerous types of genomes, including plant genomes. The CRISPR/Cas system has been used for plant genome editing, as has been described in, e.g., Belhaj et al., PLANT METHODS 9:39, 2013. Plant cells can carry out HDR, so a Cas9-induced nick or DSB can be repaired by HDR. Plant cells also have NHEJ machinery, and in some embodiments, NHEJ is inhibited, resulting in stimulation of HDR. Accordingly, in certain embodiments, the cell, or the population of cells, is a plant cell, e.g., a monocot plant cell, or a dicot plant cell, or a population of plant cell. In certain embodiments, the plant is a crop, e.g., a food crop. In certain embodiments, the plant is rice (e.g., Orzya sativa), maize (e.g., Zea mays), wheat (e.g., Triticum aestivum), soy (e.g., Glycine max), potato (e.g., Solanum tuberosum), a species of Nicotiana, a species of Arabidopsis e.g., Arabidopsis thaliana, cassava, sweet potato, sorghum, yam, plantain, or a citrus plant. In some embodiments, the plant is a pesticide-resistant plant, e.g., a plant that expresses one or more genes that confer resistance to a pesticide. In some embodiments, the plant is herbicide-resistant plant, e.g., a plant that expresses one or more genes that confer resistance to a herbicide. The herbicide may be, e.g., Roundup® (also known as glyphosate or N-(phosphonomethyl)glycine). In some embodiments, the plant produces a pesticide, e.g., Bt.

[1479] In some embodiments, the components used in the methods described herein (e.g., a Cas9 molecule and a gRNA) are introduced into the plant cell via protoplast transformation or agroinfiltration.

[1480] In some embodiments, after genome editing using the methods described herein, seeds are screened and a desired sub-population of seeds are selected. The sub-population may be, e.g., cells having a nucleic acid that was successfully altered, or cells having a desired phenotype such as minimal undesired alterations to DNA, or a phenotype that indicates the nucleic acid was successfully altered.

### IX. Delivery, Formulations and Routes of Administration

[1481] The components, e.g., a Cas9 molecule and gRNA molecule can be delivered or formulated in a variety of forms, see, e.g., Tables IX.1-IX.3. When a Cas9 or gRNA component is encoded as DNA for delivery, the DNA will typically but not necessarily include a control region, e.g., comprising a promoter, to effect expression. Useful promoters for Cas9 molecule sequences include CMV, EF-1alpha, MSCV, PGK, CAG control promoters. Useful promoters for gRNAs include H1, EF-1alpha and U6 promoters. Promoters with similar or dissimilar strengths can be selected to tune the expression of components. Sequences encoding a Cas9 molecule can comprise a nuclear localization signal (NLS), e.g., an SV40 NLS. In an embodiment a promoter for a Cas9 molecule or a gRNA molecule can be, independently, inducible, tissue specific, or cell specific.

[1482] Table IX.1 provides non-limiting examples of the form in which the components can be delivered to a target cell. Merged cells indicate that the components of those columns are delivered via the same molecule, e.g., in the second row, the gRNA and the donor template nucleic acid are delivered on the same DNA molecule as indicated by the two merged cells.

TABLE IX.1
Elements

| | | Donor | |
|---|---|---|---|
| | | Tem- | |
| Cas9 | gRNA | plate | |
| Mole- | Mole- | Nucleic | |
| cule(s) | cule(s) | Acid | Comments |
| DNA | DNA | DNA | In this embodiment, a Cas9 molecule, |
| | | | typically an eaCas9 molecule, and a gRNA |
| | | | are transcribed from DNA. In this |
| | | | embodiment, they are encoded on separate |
| | | | molecules. In this embodiment, the donor |
| | | | template is provided as a separate DNA |
| | | | molecule. |
| DNA | DNA | | In this embodiment, a Cas9 molecule, |
| | | | typically an eaCas9 molecule, and a gRNA |
| | | | are transcribed from DNA. In this |
| | | | embodiment, they are encoded on separate |
| | | | molecules. In this embodiment, the donor |
| | | | template is provided on the same DNA |
| | | | molecule that encodes the gRNA. |
| DNA | | DNA | In this embodiment, a Cas9 molecule, |
| | | | typically an eaCas9 molecule, and a gRNA |
| | | | are transcribed from DNA, here from a |
| | | | single molecule. In this embodiment, the |
| | | | donor template is provided as a separate |
| | | | DNA molecule. |
| DNA | DNA | DNA | In this embodiment, a Cas9 molecule, |
| | | | typically an eaCas9 molecule, and a gRNA |
| | | | are transcribed from DNA. In this |
| | | | embodiment, they are encoded on separate |
| | | | molecules. In this embodiment, the donor |
| | | | template is provided on the same DNA |
| | | | molecule that encodes the Cas9. |
| DNA | RNA | DNA | In this embodiment, a Cas9 molecule, |
| | | | typically an eaCas9 molecule, is transcribed |
| | | | from DNA, and a gRNA is provided as an |
| | | | RNA, e.g., as in vitro transcribed or |
| | | | synthesized RNA. In this embodiment, the |
| | | | donor template is provided as a separate |
| | | | DNA molecule. |
| DNA | RNA | DNA | In this embodiment, a Cas9 molecule, |
| | | | typically an eaCas9 molecule, is transcribed |
| | | | from DNA, and a gRNA is provided as an |
| | | | RNA, e.g., as in vitro transcribed or |
| | | | synthesized RNA. In this embodiment, the |
| | | | donor template is provided on the same DNA |
| | | | molecule that encodes the Cas9. |
| mRNA | RNA | DNA | In this embodiment, a Cas9 molecule, |
| | | | typically an eaCas9 molecule, is translated |
| | | | from in vitro transcribed or synthesized |
| | | | mRNA, and a gRNA is provided as an RNA, |
| | | | e.g., as in vitro transcribed or synthesized |
| | | | RNA. In this embodiment, the donor |
| | | | template is provided as a DNA molecule. |
| mRNA | DNA | DNA | In this embodiment, a Cas9 molecule, |
| | | | typically an eaCas9 molecule, is translated |
| | | | from in vitro transcribed or synthesized |
| | | | mRNA, and a gRNA is transcribed from |
| | | | DNA. In this embodiment, the donor |
| | | | template is provided as a separate DNA |
| | | | molecule. |
| mRNA | DNA | | In this embodiment, a Cas9 molecule, |
| | | | typically an eaCas9 molecule, is translated |
| | | | from in vitro transcribed or synthesized |
| | | | mRNA, and a gRNA is transcribed from |
| | | | DNA. In this embodiment, the donor |
| | | | template is provided on the same DNA |
| | | | molecule that encodes the gRNA. |
| Protein | DNA | DNA | In this embodiment, a Cas9 molecule, |
| | | | typically an eaCas9 molecule, is provided |
| | | | as a protein, and a gRNA is transcribed |
| | | | from DNA. In this embodiment, the donor |
| | | | template is provided as a separate DNA |
| | | | molecule. |
| Protein | DNA | | In this embodiment, a Cas9 molecule, |
| | | | typically an eaCas9 molecule, is provided |
| | | | as a protein, and a gRNA is transcribed |
| | | | from DNA. In this embodiment, the donor |
| | | | template is provided on the same DNA |
| | | | molecule that encodes the gRNA. |
| Protein | RNA | DNA | In this embodiment, an eaCas9 molecule is |
| | | | provided as a protein, and a gRNA is |
| | | | provided as transcribed or synthesized RNA. |
| | | | In this embodiment, the donor template |
| | | | is provided as a DNA molecule. |

[1483] In some embodiments, a nucleic acid encoding an HDR-enhancer molecule is on a separate nucleic acid molecule from other components being delivered (e.g., gRNAs, Cas9 molecule, or template nucleic acid). In some embodiments, a DNA encoding an HDR-enhancer molecule is part of a DNA molecule encoding one or more, e.g., all, of a gRNA or a Cas9 molecule or comprising a template nucleic acid. In some embodiments, a DNA encoding an HDR-enhancer molecule is part of a DNA molecule listed in Table IX. 1.

[1484] Other delivery combinations are illustrated in Table IX.2

TABLE IX.2
Elements

| | | Donor | | |
|---|---|---|---|---|
| Cas9 | gRNA | Template | HDR- | |
| Molecule(s) | Molecule(s) | Nucleic Acid | enhancer | Comments |
| DNA | DNA | DNA | DNA | |
| DNA | | DNA | DNA | |
| DNA | DNA | | DNA | |
| DNA | DNA | DNA | | |
| DNA | DNA | DNA | DNA | In this embodiment, the gene for |
| | | | | the Cas9 molecule and the |
| | | | | template nucleic acid are |
| | | | | provided on the same DNA |
| | | | | molecule. |
| DNA | DNA | DNA | DNA | In this embodiment, the gene for |
| | | | | the Cas9 molecule and the gene |
| | | | | for the HDR enhancer are |
| | | | | provided on the same DNA |
| | | | | molecule. |
| DNA | DNA | DNA | DNA | In this embodiment, the gene for |
| | | | | the gRNA molecule and the |
| | | | | template nucleic acid are |
| | | | | provided on the same DNA |
| | | | | molecule. |
| DNA | DNA | DNA | DNA | In this embodiment, the template |
| | | | | nucleic acid and the gene for the |
| | | | | HDR enhancer are provided on |
| | | | | the same DNA molecule. |
| DNA | | | DNA | |
| DNA | DNA | | | |
| DNA | DNA | DNA | DNA | In this embodiment, the gene for |
| | | | | the Cas9 molecule, the template |
| | | | | nucleic acid, and the gene for the |
| | | | | HDR-enhancer are provided on |
| | | | | the same DNA molecule. |
| DNA | DNA | DNA | DNA | In this embodiment, the gene for |
| | | | | the Cas9 molecule, the template |
| | | | | nucleic acid, the gene for the |
| | | | | gRNA, and the gene for the |
| | | | | HDR-enhancer are provided on |
| | | | | the same DNA molecule. |
| DNA | | | | |
| DNA | RNA | DNA | DNA | In these embodiments, the Cas9 |
| | | | | gene, template nucleic acid, and |
| | | | | HDR enhancer can be provided |
| | | | | on the same DNA molecule, on |
| | | | | three different DNA molecules, |
| | | | | or any two of the components can |
| | | | | be on a first DNA molecule and |
| | | | | the third component can be on |
| | | | | another DNA molecule. |
| DNA | RNA | DNA | mRNA | In these embodiments, the Cas9 |
| | | | | gene and template nucleic acid |
| | | | | can be on the same DNA |
| | | | | molecule or on different DNA |
| | | | | molecules. |
| DNA | RNA | DNA | Protein, small | In these embodiments, the Cas9 |
| | | | molecule, or | gene and template nucleic acid |
| | | | siRNA | can be on the same DNA |
| | | | | molecule or on different DNA |
| | | | | molecules. |
| mRNA | RNA | DNA | DNA | In these embodiments, the |
| | | | | template nucleic acid and HDR- |
| | | | | enhancer can be on the same |
| | | | | DNA molecule or on different |
| | | | | DNA molecules. |
| mRNA | RNA | DNA | mRNA | |
| mRNA | RNA | DNA | Protein, small | |
| | | | molecule, or | |
| | | | siRNA | |
| mRNA | DNA | DNA | DNA | In these embodiments, the gRNA |
| | | | | gene, template nucleic acid, and |
| | | | | HDR enhancer gene can be |
| | | | | provided on the same DNA |
| | | | | molecule, on three different DNA |
| | | | | molecules, or any two of the |
| | | | | components can be on a first |
| | | | | DNA molecule and the third |
| | | | | component can be on another |
| | | | | DNA molecule. |
| mRNA | DNA | DNA | mRNA | In these embodiments, the gRNA |
| | | | | gene and template nucleic acid |
| | | | | can be on the same DNA |
| | | | | molecule or on different DNA |
| | | | | molecules. |
| mRNA | DNA | DNA | Protein, small | In these embodiments, the gRNA |
| | | | molecule, or | gene and template nucleic acid |
| | | | siRNA | can be on the same DNA |
| | | | | molecule or on different DNA |
| | | | | molecules. |
| Protein | DNA | DNA | DNA | In these embodiments, the gRNA |
| | | | | gene, template nucleic acid, and |
| | | | | HDR-enhancer gene can be |
| | | | | provided on the same DNA |
| | | | | molecule, on three different DNA |
| | | | | molecules, or any two of the |
| | | | | components can be on a first |
| | | | | DNA molecule and the third |
| | | | | component can be on another |
| | | | | DNA molecule. |
| Protein | DNA | DNA | mRNA | In these embodiments, the gRNA |
| | | | | gene and template nucleic acid |
| | | | | can be on the same DNA |
| | | | | molecule or on different DNA |
| | | | | molecules. |
| Protein | DNA | DNA | Protein, small | In these embodiments, the gRNA |
| | | | molecule, or | gene and template nucleic acid |
| | | | siRNA | can be on the same DNA |
| | | | | molecule or on different DNA |
| | | | | molecules. |
| Protein | RNA | DNA | DNA | In these embodiments, the |
| | | | | template nucleic acid and HDR- |
| | | | | enhancer gene can be on the |
| | | | | same DNA molecule or on |
| | | | | different DNA molecules. |
| Protein | RNA | DNA | mRNA | |
| Protein | RNA | DNA | Protein, small | |
| | | | molecule, or | |
| | | | siRNA | |

[1485] Table IX.3 summarizes various delivery methods for the components of a Cas system, e.g., the Cas9 molecule component and the gRNA molecule component, as described herein.

TABLE IX.3

| | | Delivery | | | |
|---|---|---|---|---|---|
| | | into Non- | Duration | | Type of |
| | | Dividing | of | Genome | Molecule |
| Delivery Vector/Mode | | Cells | Expression | Integration | Delivered |
| Physical (e.g., | | YES | Transient | NO | Nucleic Acids |
| electroporation, particle gun, | | | | | and Proteins |
| calcium phosphate | | | | | |
| transfection) | | | | | |
| Viral | Retrovirus | NO | Stable | YES | RNA |
| | Lentivirus | YES | Stable | YES/NO with | RNA |
| | | | | modifications | |
| | Adenovirus | YES | Transient | NO | DNA |
| | Adeno- | YES | Stable | NO | DNA |
| | Associated | | | | |
| | Virus (AAV) | | | | |
| | Vaccinia Virus | YES | Transient | NO | DNA |
| | Herpes Simplex | YES | Stable | NO | DNA |
| | Virus | | | | |
| Non-Viral | Cationic | YES | Transient | Depends on | Nucleic Acids |
| | Liposomes | | | what is | and Proteins |
| | | | | delivered | |
| | Polymeric | YES | Transient | Depends on | Nucleic Acids |
| | Nanoparticles | | | what is | and Proteins |
| | | | | delivered | |
| Biological | Attenuated | YES | Transient | NO | Nucleic Acids |
| Non-Viral | Bacteria | | | | |
| Delivery | Engineered | YES | Transient | NO | Nucleic Acids |
| Vehicles | Bacteriophages | | | | |
| | Mammalian | YES | Transient | NO | Nucleic Acids |
| | Virus-like | | | | |
| | Particles | | | | |
| | Biological | YES | Transient | NO | Nucleic Acids |
| | liposomes: | | | | |
| | Erythrocyte | | | | |
| | Ghosts and | | | | |
| | Exosomes | | | | |

DNA-Based Delivery of a Cas9 Molecule and or a gRNA Molecule

[1486] DNA encoding Cas9 molecules (e.g., eaCas9 molecules), gRNA molecules, template nucleic acids, and/or HDR-enhancers, can be administered to subjects or delivered into cells by any appropriate method, e.g., by art-known methods or as described herein. For example, Cas9-encoding and/or gRNA-encoding DNA can be delivered, e.g., by vectors (e.g., viral or non-viral vectors), non-vector based methods (e.g., using naked DNA or DNA complexes), or a combination thereof.

[1487] In some embodiments, the nucleic acid, e.g., Cas9-, gRNA-, and/or HDR-enhancer-encoding DNA is delivered by a vector (e.g., viral vector/virus or plasmid).

[1488] In one embodiment, a vector can comprise a sequence that encodes a Cas9 molecule, a gRNA molecule, and/or an HDR-enhancer. In one embodiment, a vector can also comprise a sequence encoding a signal peptide (e.g., for nuclear localization, nucleolar localization, mitochondrial localization), fused, e.g., to a Cas9 molecule sequence. For example, a vector can comprise a nuclear localization sequence (e.g., from SV40) fused to the sequence encoding the Cas9 molecule.

[1489] One or more regulatory/control elements, e.g., a promoter, an enhancer, an intron, a polyadenylation signal, a Kozak consensus sequence, internal ribosome entry sites (IRES), a 2A sequence, and splice acceptor or donor can be included in the vectors. In some embodiments, the promoter is recognized by RNA polymerase II (e.g., a CMV promoter).

[1490] In some embodiments, the vector or delivery vehicle is a viral vector (e.g., for generation of recombinant viruses). In some embodiments, the virus is a DNA virus (e.g., dsDNA or ssDNA virus). In other embodiments, the virus is an RNA virus (e.g., an ssRNA virus). Exemplary viral vectors/viruses include, e.g., retroviruses, lentiviruses, adenovirus, adeno-associated virus (AAV), vaccinia viruses, poxviruses, and herpes simplex viruses.

[1491] In some embodiments, the virus infects dividing cells. In other embodiments, the virus infects non-dividing cells. In some embodiments, the virus infects both dividing and non-dividing cells. In some embodiments, the virus can integrate into the host genome. In some embodiments, the virus is engineered to have reduced immunity, e.g., in human. In some embodiments, the virus is replication-competent. In other embodiments, the virus is replication-defective, e.g., having one or more coding regions for the genes necessary for additional rounds of virion replication and/or packaging replaced with other genes or deleted. In some embodiments, the virus causes transient expression of the Cas9 molecule and/or the gRNA molecule. In other embodiments, the virus causes long-lasting, e.g., at least 1 week, 2 weeks, 1 month, 2 months, 3 months, 6 months, 9 months, 1 year, 2 years, or permanent expression, of the Cas9 molecule and/or the gRNA molecule. The packaging capacity of the viruses may vary, e.g., from at least about 4 kb to at least about 30 kb, e.g., at least about 5 kb, 10 kb, 15 kb, 20 kb, 25 kb, 30 kb, 35 kb, 40 kb, 45 kb, or 50 kb.

[1492] In some embodiments, the Cas9-, gRNA-, and/or HDR-enhancer-encoding DNA is delivered by a recombinant adenovirus. In some embodiments, the adenovirus is engineered to have reduced immunity in human.

[1493] In some embodiments, the Cas9- and/or gRNA-encoding DNA is delivered by a recombinant AAV. In some embodiments, the AAV can incorporate its genome into that of a host cell, e.g., a target cell as described herein. In some embodiments, the AAV is a self-complementary adeno-associated virus (scAAV), e.g., a scAAV that packages both strands which anneal together to form double stranded DNA. AAV serotypes that may be used in the disclosed methods, include AAV1, AAV2, modified AAV2 (e.g., modifications at Y444F, Y500F, Y730F and/or S662V), AAV3, modified AAV3 (e.g., modifications at Y705F, Y73iF and/or T492V), AAV4, AAV5, AAV6, modified AAV6 (e.g., modifications at S663V and/or T492V), AAV8, AAV 8.2, AAV9, AAV rhl0, and pseudotyped AAV, such as AAV2/8, AAV2/5 and AAV2/6 can also be used in the disclosed methods.

[1494] In some embodiments, the Cas9- and/or gRNA-encoding DNA is delivered by a non-vector based method (e.g., using naked DNA or DNA complexes). For example, the DNA can be delivered, e.g., by organically modified silica or silicate (Ormosil), electroporation, gene gun, sonoporation, magnetofection, lipid-mediated transfection, dendrimers, inorganic nanoparticles, calcium phosphates, or a combination thereof.

[1495] In an embodiment, the delivery vehicle is a non-viral vector. In an embodiment, the non-viral vector is an inorganic nanoparticle. Exemplary inorganic nanoparticles include, e.g., magnetic nanoparticles (e.g., Fe₃MnO₂) and silica. The outer surface of the nanoparticle can be conjugated with a positively charged polymer (e.g., polyethylenimine, polylysine, polyserine) which allows for attachment (e.g., conjugation or entrapment) of payload. In an embodiment, the non-viral vector is an organic nanoparticle (e.g., entrapment of the payload inside the nanoparticle). Exemplary organic nanoparticles include, e.g., SNALP liposomes that contain cationic lipids together with neutral helper lipids which are coated with polyethylene glycol (PEG) and protamine and nucleic acid complex coated with lipid coating.

[1496] Exemplary lipids for gene transfer are shown below in Table IX.4.

TABLE IX.4
Lipids Used for Gene Transfer

| Lipid | Abbreviation | Feature |
|---|---|---|
| 1,2-Dioleoyl-sn-glycero-3-phosphatidylcholine | DOPC | Helper |
| 1,2-Dioleoyl-sn-glycero-3- | DOPE | Helper |
| phosphatidylethanolamine | | |
| Cholesterol | | Helper |
| N-[1-(2,3-Dioleyloxy)prophyl]N,N,N- | DOTMA | Cationic |
| trimethylammonium chloride | | |
| 1,2-Dioleoyloxy-3-trimethylammonium-propane | DOTAP | Cationic |
| Dioctadecylamidoglycylspermine | DOGS | Cationic |
| N-(3-Aminopropyl)-N,N-dimethyl-2,3- | GAP-DLRIE | Cationic |
| bis(dodecyloxy)-1-propanaminium bromide | | |
| Cetyltrimethylammonium bromide | CTAB | Cationic |
| 6-Lauroxyhexyl ornithinate | LHON | Cationic |
| 1-(2,3-Dioleoyloxypropyl)-2,4,6- | 2Oc | Cationic |
| trimethylpyridinium | | |
| 2,3-Diolcyloxy-N-[2(sperminecarboxamido- | DOSPA | Cationic |
| ethyl]-N,N-dimethyl-1- | | |
| propanaminium trifluoroacetate | | |
| 1,2-Dioleyl-3-trimethylammonium-propane | DOPA | Cationic |
| N-(2-Hydroxyethyl)-N,N-dimethyl-2,3- | MDRIE | Cationic |
| bis(tetradecyloxy)-1-propanaminium bromide | | |
| Dimyristooxypropyl dimethyl hydroxyethyl | DMRI | Cationic |
| ammonium bromide | | |
| 3β-[N-(N′,N′-Dimethylaminoethane)- | DC-Chol | Cationic |
| carbamoyl]cholesterol | | |
| Bis-guanidium-tren-cholesterol | BGTC | Cationic |
| 1,3-Diodeoxy-2-(6-carboxy-spermyl)-propylamide | DOSPER | Cationic |
| Dimethyloctadecylammonium bromide | DDAB | Cationic |
| Dioctadecylamidoglicylspermidin | DSL | Cationic |
| rac-[(2,3-Dioctadecyloxypropyl)(2- | CLIP-1 | Cationic |
| hydroxyethyl)]-dimethylammonium chloride | | |
| rac-[2(2,3-Dihexadecyloxypropyl- | CLIP-6 | Cationic |
| oxymethyloxy)ethyl]trimethylammonium bromide | | |
| Ethyldimyristoylphosphatidylcholine | EDMPC | Cationic |
| 1,2-Distcaryloxy-N,N-dimethyl-3-aminopropane | DSDMA | Cationic |
| 1,2-Dimyristoyl-trimethylammonium propane | DMTAP | Cationic |
| O,O′-Dimyristyl-N-lysyl aspartate | DMKE | Cationic |
| 1,2-Distearoyl-sn-glycero-3-ethylphosphocholine | DSEPC | Cationic |
| N-Palmitoyl D-erythro-sphingosyl carbamoyl- | CCS | Cationic |
| spermine | | |
| N-t-Butyl-N0-tetradecyl-3- | diC14- | Cationic |
| tetradecylaminopropionamidine | amidine | |
| Octadecenolyoxy[ethyl-2-heptadecenyl- | DOTIM | Cationic |
| 3 hydroxyethyl] imidazolinium chloride | | |
| N1-Cholesteryloxycarbonyl-3,7-diazanonane- | CDAN | Cationic |
| 1,9-diamine | | |
| 2-(3-[Bis(3-amino-propyl)- | RPR209120 | Cationic |
| amino]propylamino)-N- | | |
| ditetradecylcarbamoylme-ethyl-acetamide | | |
| 1,2-dilinoleyloxy-3-dimethylaminopropane | DLinDMA | Cationic |
| 2,2-dilinoleyl-4-dimethylaminoethyl-[1,3]- | DLin-KC2- | Cationic |
| dioxolane | DMA | |
| dilinoleyl-methyl-4-dimethylaminobutyrate | DLin-MC3- | Cationic |
| | DMA | |

[1497] Exemplary polymers for gene transfer are shown below in Table IX.5.

TABLE IX.5
Polymers Used for Gene Transfer

| Polymer | Abbreviation |
|---|---|
| Poly(ethylene)glycol | PEG |
| Polyethylenimine | PEI |
| Dithiobis(succinimidylpropionate) | DSP |
| Dimethyl-3,3′-dithiobispropionimidate | DTBP |
| Poly(ethylene imine)biscarbamate | PEIC |
| Poly(L-lysine) | PLL |
| Histidine modified PLL | |
| Poly(N-vinylpyrrolidone) | PVP |
| Poly(propylenimine) | PPI |
| Poly(amidoamine) | PAMAM |
| Poly(amidoethylenimine) | SS-PAEI |
| Triethylenetetramine | TETA |
| Poly(β-aminoester) | |
| Poly(4-hydroxy-L-proline ester) | PHP |
| Poly(allylamine) | |
| Poly(α-[4-aminobutyl]-L-glycolic acid) | PAGA |
| Poly(D,L-lactic-co-glycolic acid) | PLGA |
| Poly(N-ethyl-4-vinylpyridinium bromide) | |
| Poly(phosphazene)s | PPZ |
| Poly(phosphoester)s | PPE |
| Poly(phosphoramidate)s | PPA |
| Poly(N-2-hydroxypropylmethacrylamide) | pHPMA |
| Poly (2-(dimethylamino)ethyl methacrylate) | pDMAEMA |
| Poly(2-aminoethyl propylene phosphate) | PPE-EA |
| Chitosan | |
| Galactosylated chitosan | |
| N-Dodacylated chitosan | |
| Histone | |
| Collagen | |
| Dextran-spermine | D-SPM |

[1498] In an embodiment, the vehicle has targeting modifications to increase target cell update of nanoparticles and liposomes, e.g., cell specific antigens, monoclonal antibodies, single chain antibodies, aptamers, polymers, sugars, and cell penetrating peptides. In an embodiment, the vehicle uses fusogenic and endosome-destabilizing peptides/polymers. In an embodiment, the vehicle undergoes acid-triggered conformational changes (e.g., to accelerate endosomal escape of the cargo). In an embodiment, a stimuli-cleavable polymer is used, e.g., for release in a cellular compartment. For example, disulfide-based cationic polymers that are cleaved in the reducing cellular environment can be used.

[1499] In an embodiment, the delivery vehicle is a biological non-viral delivery vehicle.

[1500] In an embodiment, one or more nucleic acid molecules (e.g., a DNA molecule or a template nucleic acid) other than the components of a Cas system, e.g., the Cas9 molecule component and/or the gRNA molecule component described herein, are delivered. In an embodiment, the nucleic acid molecule is delivered at the same time as one or more of the components of the Cas system are delivered. In an embodiment, the nucleic acid molecule is delivered before or after (e.g., less than about 30 minutes, 1 hour, 2 hours, 3 hours, 6 hours, 9 hours, 12 hours, 1 day, 2 days, 3 days, 1 week, 2 weeks, or 4 weeks) one or more of the components of the Cas system are delivered. In an embodiment, the nucleic acid molecule is delivered by a different means than one or more of the components of the Cas system, e.g., the Cas9 molecule component and/or the gRNA molecule component, are delivered. The nucleic acid molecule can be delivered by any of the delivery methods described herein. For example, the nucleic acid molecule can be delivered by a viral vector, e.g., an integration-deficient lentivirus, and the Cas9 molecule component and/or the gRNA molecule component can be delivered by electroporation, e.g., such that the toxicity caused by nucleic acids (e.g., DNAs) can be reduced. In an embodiment, the nucleic acid molecule encodes a therapeutic protein, e.g., a protein described herein. In an embodiment, the nucleic acid molecule encodes an RNA molecule, e.g., an RNA molecule described herein. In some embodiments, the nucleic acid is a template nucleic acid capable of participating in HDR.

[1501] Delivery of RNA Encoding a Cas9 Molecule

[1502] RNA encoding Cas9 molecules (e.g., eaCas9 molecules) and/or gRNA molecules, can be delivered into cells, e.g., target cells described herein, by any appropriate method, including art-known methods or methods described herein. For example, Cas9-encoding and/or gRNA-encoding RNA can be delivered, e.g., by microinjection, electroporation, lipid-mediated transfection, peptide-mediated delivery, or a combination thereof.

[1503] Delivery of Cas9 Molecule Protein

[1504] Cas9 molecules (e.g., eaCas9 molecules) can be delivered into cells by any appropriate method, including art-known methods or methods described herein. For example, Cas9 protein molecules can be delivered, e.g., by microinjection, electroporation, lipid-mediated transfection, peptide-mediated delivery, or a combination thereof. Delivery can be accompanied by DNA encoding a gRNA or by a gRNA.

[1505] Route of Administration

[1506] Systemic modes of administration include oral and parenteral routes. Parenteral routes include, by way of example, intravenous, intrarterial, intraosseous, intramuscular, intradermal, subcutaneous, intranasal and intraperitoneal routes. Components administered systemically may be modified or formulated to target the components to the desired cell type.

[1507] Local modes of administration include, by way of example, intrathecal, intracerebroventricular, intraparenchymal (e.g., localized intraparenchymal delivery to the striatum (e.g., into the caudate or into the putamen)), cerebral cortex, precentral gyrus, hippocampus (e.g., into the dentate gyrus or CA3 region), temporal cortex, amygdala, frontal cortex, thalamus, cerebellum, medulla, hypothalamus, tectum, tegmentum or substantia nigra intraocular, intraorbital, subconjuctival, intravitreal, subretinal or transscleral routes. In an embodiment, significantly smaller amounts of the components (compared with systemic approaches) may exert an effect when administered locally (for example, intraparenchymal or intravitreal) compared to when administered systemically (for example, intravenously). Local modes of administration can reduce or eliminate the incidence of potentially toxic side effects that may occur when therapeutically effective amounts of a component are administered systemically.

[1508] Administration may be provided as a periodic bolus or as continuous infusion from an internal reservoir or from an external reservoir (for example, from an intravenous bag). Components may be administered locally, for example, by continuous release from a sustained release drug delivery device.

[1509] In some embodiments, the methods herein involve delivering macromolecules (e.g., a Cas9 protein or nucleic acid, a gRNA or nucleic acid encoding a gRNA, or a template nucleic acid, or any combination thereof) and small molecules (e.g., an HDR-enhancer). In some embodiments, the small molecule is delivered via a different route from one or more macromolecules. The small molecule may be administered, for instance, in a form suitable for oral, parenteral (including subcutaneous, intradermal, intramuscular, intravenous, and intraarticular), inhalation (including fine particle dusts or mists which may be generated by means of various types of metered doses, pressurized aerosols, nebulizers or insufflators, and including intranasally or via the lungs), rectal and topical (including dermal, transdermal, transmucosal, buccal, sublingual, and intraocular) administration, although the most suitable route may depend upon, for example, the condition and disorder of the recipient.

[1510] Bi-Modal or Differential Delivery of Components

[1511] Separate delivery of the components of a Cas system, e.g., the Cas9 molecule component and the gRNA molecule component, and more particularly, delivery of the components by differing modes, can enhance performance, e.g., by improving tissue specificity and safety.

[1512] In an embodiment, the Cas9 molecule and the gRNA molecule are delivered by different modes, or as sometimes referred to herein as differential modes. Different or differential modes, as used herein, refer to modes of delivery that confer different pharmacodynamic or pharmacokinetic properties on the subject component molecule, e.g., a Cas9 molecule, gRNA molecule, or template nucleic acid. For example, the modes of delivery can result in different tissue distribution, different half-life, or different temporal distribution, e.g., in a selected compartment, tissue, or organ. In many embodiments, the components are delivered so that Cas9 and the gRNA will be present in the same cell at the same time. In some embodiments, the HDR-enhancer molecule is delivered in a manner that allows HDR to be the favored repair pathway at the time the Cas9 molecule and gRNA cleave the desired region of the genome.

[1513] In some embodiments, two gRNAs are delivered to a cell so that a first nickase will make a first single strand break and a second nickase will make a second single strand break. In such embodiments, the two gRNAs and other components (e.g., the Cas9 molecule) are delivered such that the two breaks are made at substantially the same time. In some embodiments this comprises the second break being formed before the first break engages with machinery specific to the SSBR (single strand break repair) pathway, and in some embodiments, it comprises the second break being formed before the first break is repaired. More generally, when one desires to make two or more breaks in a target nucleic acid, the gRNAs and other components can be delivered such that the two or more breaks are made at substantially the same time.

[1514] Some modes of delivery, e.g., delivery by a nucleic acid vector that persists in a cell, or in progeny of a cell, e.g., by autonomous replication or insertion into cellular nucleic acid, result in more persistent expression of and presence of a component. Examples include viral, e.g., adeno-associated virus or lentivirus, delivery.

[1515] By way of example, the components, e.g., a Cas9 molecule and a gRNA molecule, can be delivered by modes that differ in terms of resulting half-life or persistent of the delivered component the body, or in a particular compartment, tissue or organ. In an embodiment, a gRNA molecule can be delivered by such modes. The Cas9 molecule component can be delivered by a mode which results in less persistence or less exposure to the body or a particular compartment or tissue or organ.

[1516] More generally, in an embodiment, a first mode of delivery is used to deliver a first component and a second mode of delivery is used to deliver a second component. The first mode of delivery confers a first pharmacodynamic or pharmacokinetic property. The first pharmacodynamic property can be, e.g., distribution, persistence, or exposure, of the component, or of a nucleic acid that encodes the component, in the body, a compartment, tissue or organ. The second mode of delivery confers a second pharmacodynamic or pharmacokinetic property. The second pharmacodynamic property can be, e.g., distribution, persistence, or exposure, of the component, or of a nucleic acid that encodes the component, in the body, a compartment, tissue or organ.

[1517] In an embodiment, the first pharmacodynamic or pharmacokinetic property, e.g., distribution, persistence or exposure, is more limited than the second pharmacodynamic or pharmacokinetic property.

[1518] In an embodiment, the first mode of delivery is selected to optimize, e.g., minimize, a pharmacodynamic or pharmacokinetic property, e.g., distribution, persistence or exposure.

[1519] In an embodiment, the second mode of delivery is selected to optimize, e.g., maximize, a pharmacodynamic or pharmacokinetic property, e.g., distribution, persistence or exposure.

[1520] In an embodiment, the first mode of delivery comprises the use of a relatively persistent element, e.g., a nucleic acid, e.g., a plasmid or viral vector, e.g., an AAV or lentivirus. As such vectors are relatively persistent product transcribed from them would be relatively persistent.

[1521] In an embodiment, the second mode of delivery comprises a relatively transient element, e.g., an RNA or protein.

[1522] In an embodiment, the first component comprises gRNA, and the delivery mode is relatively persistent, e.g., the gRNA is transcribed from a plasmid or viral vector, e.g., an AAV or lentivirus. Transcription of these genes would be of little physiological consequence because the genes generally do not encode for a protein product, and the gRNAs are incapable of acting in isolation. The second component, a Cas9 molecule, is delivered in a transient manner, for example as mRNA or as protein, ensuring that the full Cas9 molecule/gRNA molecule complex is only present and active for a short period of time.

[1523] Furthermore, the components can be delivered in different molecular form or with different delivery vectors that complement one another to enhance safety and tissue specificity.

[1524] Use of differential delivery modes can enhance performance, safety and efficacy. For example, the likelihood of an eventual off-target modification can be reduced. Delivery of immunogenic components, e.g., Cas9 molecules, by less persistent modes can reduce immunogenicity, as peptides from the bacterially-derived Cas enzyme are displayed on the surface of the cell by MHC molecules. A two-part delivery system can alleviate these drawbacks.

[1525] Differential delivery modes can be used to deliver components to different, but overlapping target regions. The formation active complex is minimized outside the overlap of the target regions. Thus, in an embodiment, a first component, e.g., a gRNA molecule is delivered by a first delivery mode that results in a first spatial, e.g., tissue, distribution. A second component, e.g., a Cas9 molecule is delivered by a second delivery mode that results in a second spatial, e.g., tissue, distribution. In an embodiment, the first mode comprises a first element selected from a liposome, nanoparticle, e.g., polymeric nanoparticle, and a nucleic acid, e.g., viral vector. The second mode comprises a second element selected from the group. In an embodiment, the first mode of delivery comprises a first targeting element, e.g., a cell specific receptor or an antibody, and the second mode of delivery does not include that element. In embodiment, the second mode of delivery comprises a second targeting element, e.g., a second cell specific receptor or second antibody.

[1526] When the Cas9 molecule is delivered in a virus delivery vector, a liposome, or polymeric nanoparticle, there is the potential for delivery to and therapeutic activity in multiple tissues, when it may be desirable to only target a single tissue. A two-part delivery system can resolve this challenge and enhance tissue specificity. If the gRNA molecule and the Cas9 molecule are packaged in separated delivery vehicles with distinct but overlapping tissue tropism, the fully functional complex is only formed in the tissue that is targeted by both vectors.

[1527] Ex Vivo Delivery

[1528] In some embodiments, components described in Table IX.1 or IX.2 and a HDR-enhancer are introduced into cells which are then introduced into the subject. Methods of introducing the components can include, e.g., any of the delivery methods described in Table IX.3.

[1529] In some embodiments, treating cells with an HDR-enhancer ex vivo reduces the risk of that HDR-enhancer causing a side effect that would likely occur if the HDR-enhancer was administered to the patient's body.

[1530] In some embodiments, the cells are contacted with a Cas9 molecule (or a nucleic acid encoding it) ex vivo. In some embodiments, the cells are contacted with a gRNA (or a nucleic acid encoding it) ex vivo. In some embodiment, the cells are contacted with a template nucleic acid ex vivo. In some embodiments, the cells are contacted with an HDR-enhancer (or a nucleic acid encoding it) ex vivo. In some embodiments, the cells are contacted with two, three, or all four of the preceding compositions (or nucleic acids encoding them) ex vivo. In some embodiments, the cells are contacted with one or more of the preceding components (or nucleic acids encoding them), and one or more remaining components are administered to the patient.

### X. Modified Nucleosides, Nucleotides, and Nucleic Acids

[1531] Modified nucleosides and modified nucleotides can be present in nucleic acids, e.g., particularly gRNA and/or a template nucleic acid, but also other forms of DNA or RNA, e.g., mRNA, RNAi, or siRNA. As described herein, “nucleoside” is defined as a compound containing a five-carbon sugar molecule (a pentose such as deoxyribose or ribose) or derivative thereof, and an organic base (purine or pyrimidine, or a derivative thereof). As described herein, “nucleotide” is defined as a nucleoside further comprising a phosphate group.

[1532] Modified nucleosides and nucleotides can include one or more of:
[1533] (i) alteration, e.g., replacement, of one or both of the non-linking phosphate oxygens and/or of one or more of the linking phosphate oxygens in the phosphodiester backbone linkage;
[1534] (ii) alteration, e.g., replacement, of a constituent of the ribose or deoxyribose sugar, e.g., of the 2′ hydroxyl on the sugar;
[1535] (iii) wholesale replacement of the phosphate moiety with “dephospho” linkers;
[1536] (iv) modification or replacement of a naturally occurring nucleobase;
[1537] (v) replacement or modification of the ribose- or deoxyribose-phosphate backbone;
[1538] (vi) modification of the 3′ end or 5′ end of the oligonucleotide, e.g., removal, modification or replacement of a terminal phosphate group or conjugation of a moiety; and
[1539] (vii) modification of the sugar.

[1540] The modifications listed above can be combined to provide modified nucleosides and nucleotides that can have two, three, four, or more modifications. For example, a modified nucleoside or nucleotide can have a modified sugar and a modified nucleobase. In an embodiment, every base of a gRNA or template nucleic acid is modified, e.g., all bases have a modified phosphate group, e.g., all are phosphorothioate groups. In an embodiment, all, or substantially all, of the phosphate groups of a unimolecular or modular gRNA molecule or template nucleic acid are replaced with phosphorothioate groups.

[1541] In an embodiment, modified nucleotides, e.g., nucleotides having modifications as described herein, can be incorporated into a nucleic acid, e.g., a “modified nucleic acid.” In some embodiments, the modified nucleic acids comprise one, two, three or more modified nucleotides. In some embodiments, at least 5% (e.g., at least about 5%, at least about 10%, at least about 15%, at least about 20%, at least about 25%, at least about 30%, at least about 35%, at least about 40%, at least about 45%, at least about 50%, at least about 55%, at least about 60%, at least about 65%, at least about 70%, at least about 75%, at least about 80%, at least about 85%, at least about 90%, at least about 95%, or about 100%) of the positions in a modified nucleic acid are a modified nucleotides.

[1542] Unmodified nucleic acids can be prone to degradation by, e.g., cellular nucleases. For example, nucleases can hydrolyze nucleic acid phosphodiester bonds. Accordingly, in one aspect the modified nucleic acids described herein can contain one or more modified nucleosides or nucleotides, e.g., to introduce stability toward nucleases.

[1543] In some embodiments, the modified nucleosides, modified nucleotides, and modified nucleic acids described herein can exhibit a reduced innate immune response when introduced into a population of cells, both in vivo and ex vivo. The term “innate immune response” includes a cellular response to exogenous nucleic acids, including single stranded nucleic acids, generally of viral or bacterial origin, which involves the induction of cytokine expression and release, particularly the interferons, and cell death. In some embodiments, the modified nucleosides, modified nucleotides, and modified nucleic acids described herein can disrupt binding of a major groove interacting partner with the nucleic acid. In some embodiments, the modified nucleosides, modified nucleotides, and modified nucleic acids described herein can exhibit a reduced innate immune response when introduced into a population of cells, both in vivo and ex vivo, and also disrupt binding of a major groove interacting partner with the nucleic acid.

[1544] In some embodiments, a template nucleic acid comprises modifications, e.g., modified nucleotides, modifications to the backbone, and other modifications described herein. In some embodiments, the modification improves the stability of the template nucleic acid, e.g., by increasing its resistance to endonucleases and/or exonucleases.

[1545] In some embodiments, a template nucleic acid that comprises modifications is double stranded, e.g., is double stranded DNA. In some such embodiments, all the modifications are confined to one strand. In other embodiments, modifications are present on both strands. Modifications may be present in the 5′ homology arm, the 3′ homology arm, or the replacement sequence, or any combination thereof. In some embodiments, modifications are present in one or both homology arms but not the replacement sequence.

[1546] In some embodiments, a template nucleic acid that comprises modifications is single stranded, e.g., is single stranded DNA.

[1547] Definitions of Chemical Groups

[1548] As used herein, “alkyl” is meant to refer to a saturated hydrocarbon group which is straight-chained or branched. Example alkyl groups include methyl (Me), ethyl (Et), propyl (e.g., n-propyl and isopropyl), butyl (e.g., n-butyl, isobutyl, t-butyl), pentyl (e.g., n-pentyl, isopentyl, neopentyl), and the like. An alkyl group can contain from 1 to about 20, from 2 to about 20, from 1 to about 12, from 1 to about 8, from 1 to about 6, from 1 to about 4, or from 1 to about 3 carbon atoms.

[1549] As used herein, “aryl” refers to monocyclic or polycyclic (e.g., having 2, 3 or 4 fused rings) aromatic hydrocarbons such as, for example, phenyl, naphthyl, anthracenyl, phenanthrenyl, indanyl, indenyl, and the like. In some embodiments, aryl groups have from 6 to about 20 carbon atoms.

[1550] As used herein, “alkenyl” refers to an aliphatic group containing at least one double bond.

[1551] As used herein, “alkynyl” refers to a straight or branched hydrocarbon chain containing 2-12 carbon atoms and characterized in having one or more triple bonds. Examples of alkynyl groups include, but are not limited to, ethynyl, propargyl, and 3-hexynyl.

[1552] As used herein, “arylalkyl” or “aralkyl” refers to an alkyl moiety in which an alkyl hydrogen atom is replaced by an aryl group. Aralkyl includes groups in which more than one hydrogen atom has been replaced by an aryl group. Examples of “arylalkyl” or “aralkyl” include benzyl, 2-phenylethyl, 3-phenylpropyl, 9-fluorenyl, benzhydryl, and trityl groups.

[1553] As used herein, “cycloalkyl” refers to a cyclic, bicyclic, tricyclic, or polycyclic non-aromatic hydrocarbon groups having 3 to 12 carbons. Examples of cycloalkyl moieties include, but are not limited to, cyclopropyl, cyclopentyl, and cyclohexyl.

[1554] As used herein, “heterocyclyl” refers to a monovalent radical of a heterocyclic ring system. Representative heterocyclyls include, without limitation, tetrahydrofuranyl, tetrahydrothienyl, pyrrolidinyl, pyrrolidonyl, piperidinyl, pyrrolinyl, piperazinyl, dioxanyl, dioxolanyl, diazepinyl, oxazepinyl, thiazepinyl, and morpholinyl.

[1555] As used herein, “heteroaryl” refers to a monovalent radical of a heteroaromatic ring system. Examples of heteroaryl moieties include, but are not limited to, imidazolyl, oxazolyl, thiazolyl, triazolyl, pyrrolyl, furanyl, indolyl, thiophenyl pyrazolyl, pyridinyl, pyrazinyl, pyridazinyl, pyrimidinyl, indolizinyl, purinyl, naphthyridinyl, quinolyl, and pteridinyl.

[1556] Phosphate Backbone Modifications

[1557] The Phosphate Group

[1558] In some embodiments, the phosphate group of a modified nucleotide can be modified by replacing one or more of the oxygens with a different substituent. Further, the modified nucleotide, e.g., modified nucleotide present in a modified nucleic acid, can include the wholesale replacement of an unmodified phosphate moiety with a modified phosphate as described herein. In some embodiments, the modification of the phosphate backbone can include alterations that result in either an uncharged linker or a charged linker with unsymmetrical charge distribution.

[1559] Examples of modified phosphate groups include phosphorothioate, phosphoroselenates, borano phosphates, borano phosphate esters, hydrogen phosphonates, phosphoroamidates, alkyl or aryl phosphonates and phosphotriesters. In some embodiments, one of the non-bridging phosphate oxygen atoms in the phosphate backbone moiety can be replaced by any of the following groups: sulfur (S), selenium (Se), BR₃ (wherein R can be, e.g., hydrogen, alkyl, or aryl), C (e.g., an alkyl group, an aryl group, and the like), H, NR₂ (wherein R can be, e.g., hydrogen, alkyl, or aryl), or OR (wherein R can be, e.g., alkyl or aryl). The phosphorous atom in an unmodified phosphate group is achiral. However, replacement of one of the non-bridging oxygens with one of the above atoms or groups of atoms can render the phosphorous atom chiral; that is to say that a phosphorous atom in a phosphate group modified in this way is a stereogenic center. The stereogenic phosphorous atom can possess either the “R” configuration (herein Rp) or the “S” configuration (herein Sp).

[1560] Phosphorodithioates have both non-bridging oxygens replaced by sulfur. The phosphorus center in the phosphorodithioates is achiral which precludes the formation of oligoribonucleotide (or oligodeoxyribonucleotide) diastereomers. In some embodiments, modifications to one or both non-bridging oxygens can also include the replacement of the non-bridging oxygens with a group independently selected from S, Se, B, C, H, N, and OR (R can be, e.g., alkyl or aryl).

[1561] The phosphate linker can also be modified by replacement of a bridging oxygen, (i.e., the oxygen that links the phosphate to the nucleoside), with nitrogen (bridged phosphoroamidates), sulfur (bridged phosphorothioates) and carbon (bridged methylenephosphonates). The replacement can occur at either linking oxygen or at both of the linking oxygens.

[1562] Replacement of the Phosphate Group

[1563] The phosphate group can be replaced by non-phosphorus containing connectors. In some embodiments, the charge phosphate group can be replaced by a neutral moiety.

[1564] Examples of moieties which can replace the phosphate group can include, without limitation, e.g., methyl phosphonate, hydroxylamino, siloxane, carbonate, carboxymethyl, carbamate, amide, thioether, ethylene oxide linker, sulfonate, sulfonamide, thioformacetal, formacetal, oxime, methyleneimino, methylenemethylimino, methylenehydrazo, methylenedimethylhydrazo and methyleneoxymethylimino.

[1565] Replacement of the Ribophosphate Backbone

[1566] Scaffolds that can mimic nucleic acids can also be constructed wherein the phosphate linker and ribose sugar are replaced by nuclease resistant nucleoside or nucleotide surrogates. In some embodiments, the nucleobases can be tethered by a surrogate backbone. Examples can include, without limitation, the morpholino, cyclobutyl, pyrrolidine and peptide nucleic acid (PNA) nucleoside surrogates.

[1567] Sugar Modifications

[1568] The modified nucleosides and modified nucleotides can include one or more modifications to the sugar group. For example, the 2′ hydroxyl group (OH) can be modified or replaced with a number of different “oxy” or “deoxy” substituents. In some embodiments, modifications to the 2′ hydroxyl group can enhance the stability of the nucleic acid since the hydroxyl can no longer be deprotonated to form a 2′-alkoxide ion. The 2′-alkoxide can catalyze degradation by intramolecular nucleophilic attack on the linker phosphorus atom.

[1569] Examples of “oxy”-2′ hydroxyl group modifications can include alkoxy or aryloxy (OR, wherein “R” can be, e.g., alkyl, cycloalkyl, aryl, aralkyl, heteroaryl or a sugar); polyethyleneglycols (PEG), O(CH₂CH₂O),CH₂CH₂OR wherein R can be, e.g., H or optionally substituted alkyl, and n can be an integer from 0 to 20 (e.g., from 0 to 4, from 0 to 8, from 0 to 10, from 0 to 16, from 1 to 4, from 1 to 8, from 1 to 10, from 1 to 16, from 1 to 20, from 2 to 4, from 2 to 8, from 2 to 10, from 2 to 16, from 2 to 20, from 4 to 8, from 4 to 10, from 4 to 16, and from 4 to 20). In some embodiments, the “oxy”-2′ hydroxyl group modification can include “locked” nucleic acids (LNA) in which the 2′ hydroxyl can be connected, e.g., by a C₁₋₆ alkylene or C₁₋₆ heteroalkylene bridge, to the 4′ carbon of the same ribose sugar, where exemplary bridges can include methylene, propylene, ether, or amino bridges; O-amino (wherein amino can be, e.g., NH₂; alkylamino, dialkylamino, heterocyclyl, arylamino, diarylamino, heteroarylamino, or diheteroarylamino, ethylenediamine, or polyamino) and aminoalkoxy, O(CH₂)ₙ-amino, (wherein amino can be, e.g., NH₂; alkylamino, dialkylamino, heterocyclyl, arylamino, diarylamino, heteroarylamino, or diheteroarylamino, ethylenediamine, or polyamino). In some embodiments, the “oxy”-2′ hydroxyl group modification can include the methoxyethyl group (MOE), (OCH₂CH₂OCH₃, e.g., a PEG derivative).

[1570] “Deoxy” modifications can include hydrogen (i.e. deoxyribose sugars, e.g., at the overhang portions of partially ds RNA); halo (e.g., bromo, chloro, fluoro, or iodo); amino (wherein amino can be, e.g., NH₂; alkylamino, dialkylamino, heterocyclyl, arylamino, diarylamino, heteroarylamino, diheteroarylamino, or amino acid); NH(CH₂CH₂NH)ₙCH₂CH₂-amino (wherein amino can be, e.g., as described herein), —NHC(O)R (wherein R can be, e.g., alkyl, cycloalkyl, aryl, aralkyl, heteroaryl or sugar), cyano; mercapto; alkyl-thio-alkyl; thioalkoxy; and alkyl, cycloalkyl, aryl, alkenyl and alkynyl, which may be optionally substituted with, e.g., an amino as described herein.

[1571] The sugar group can also contain one or more carbons that possess the opposite stereochemical configuration than that of the corresponding carbon in ribose. Thus, a modified nucleic acid can include nucleotides containing e.g., arabinose, as the sugar. The nucleotide “monomer” can have an alpha linkage at the 1′ position on the sugar, e.g., alpha-nucleosides. The modified nucleic acids can also include “abasic” sugars, which lack a nucleobase at C-1′. These abasic sugars can also be further modified at one or more of the constituent sugar atoms. The modified nucleic acids can also include one or more sugars that are in the L form, e.g., L-nucleosides.

[1572] Generally, RNA includes the sugar group ribose, and DNA includes the sugar group deoxyribose, each of which is a 5-membered ring having an oxygen. Exemplary modified nucleosides and modified nucleotides can include, without limitation, replacement of the oxygen in the ribose or deoxyribose ring (e.g., with sulfur (S), selenium (Se), or alkylene, such as, e.g., methylene or ethylene); addition of a double bond (e.g., to replace ribose with cyclopentenyl or cyclohexenyl); ring contraction of ribose (e.g., to form a 4-membered ring of cyclobutane or oxetane); ring expansion of ribose (e.g., to form a 6- or 7-membered ring having an additional carbon or heteroatom, such as for example, anhydrohexitol, altritol, mannitol, cyclohexanyl, cyclohexenyl, and morpholino that also has a phosphoramidate backbone). In some embodiments, the modified nucleotides can include multicyclic forms (e.g., tricyclo; and “unlocked” forms, such as glycol nucleic acid (GNA) (e.g., R-GNA or S-GNA, where ribose is replaced by glycol units attached to phosphodiester bonds), threose nucleic acid (TNA, where ribose is replaced with α-L-threofuranosyl-(3′→2′)).

[1573] Modifications on the Nucleobase

[1574] The modified nucleosides and modified nucleotides described herein, which can be incorporated into a modified nucleic acid, can include a modified nucleobase. Examples of nucleobases include, but are not limited to, adenine (A), guanine (G), cytosine (C), and uracil (U). These nucleobases can be modified or wholly replaced to provide modified nucleosides and modified nucleotides that can be incorporated into modified nucleic acids. The nucleobase of the nucleotide can be independently selected from a purine, a pyrimidine, a purine or pyrimidine analog. In some embodiments, the nucleobase can include, for example, naturally-occurring and synthetic derivatives of a base.

[1575] Uracil

[1576] In some embodiments, the modified nucleobase is a modified uracil. Exemplary nucleobases and nucleosides having a modified uracil include without limitation pseudouridine (ψ), pyridin-4-one ribonucleoside, 5-aza-uridine, 6-aza-uridine, 2-thio-5-aza-uridine, 2-thio-uridine (s2U), 4-thio-uridine (s4U), 4-thio-pseudouridine, 2-thio-pseudouridine, 5-hydroxy-uridine (ho⁵U), 5-aminoallyl-uridine, 5-halo-uridine (e.g., 5-iodo-uridine or 5-bromo-uridine), 3-methyl-uridine (m³U), 5-methoxy-uridine (mo⁵U), uridine 5-oxyacetic acid (cmo⁵U), uridine 5-oxyacetic acid methyl ester (mcmo⁵U), 5-carboxymethyl-uridine (cm⁵U), 1-carboxymethyl-pseudouridine, 5-carboxyhydroxymethyl-uridine (chm⁵U), 5-carboxyhydroxymethyl-uridine methyl ester (mchm⁵U), 5-methoxycarbonylmethyl-uridine (mcm⁵U), 5-methoxycarbonylmethyl-2-thio-uridine (mcm⁵s2U), 5-aminomethyl-2-thio-uridine (nm⁵s2U), 5-methylaminomethyl-uridine (mnm⁵U), 5-methylaminomethyl-2-thio-uridine (mnm⁵s2U), 5-methylaminomethyl-2-seleno-uridine (mnm⁵se²U), 5-carbamoylmethyl-uridine (ncm⁵U), 5-carboxymethylaminomethyl-uridine (cmnm⁵U), 5-carboxymethylaminomethyl-2-thio-uridine (cmnm⁵s2U), 5-propynyl-uridine, 1-propynyl-pseudouridine, 5-taurinomethyl-uridine (τcm⁵U), 1-taurinomethyl-pseudouridine, 5-taurinomethyl-2-thio-uridine(rm⁵s2U), 1-taurinomethyl-4-thio-pseudouridine, 5-methyl-uridine (m⁵U, i.e., having the nucleobase deoxythymine), 1-methyl-pseudouridine (m¹ψ), 5-methyl-2-thio-uridine (m⁵s2U), 1-methyl-4-thio-pseudouridine (m¹s4ψ), 4-thio-1-methyl-pseudouridine, 3-methyl-pseudouridine (m³ψ), 2-thio-1-methyl-pseudouridine, 1-methyl-1-deaza-pseudouridine, 2-thio-1-methyl-1-deaza-pseudouridine, dihydrouridine (D), dihydropseudouridine, 5,6-dihydrouridine, 5-methyl-dihydrouridine (m⁵D), 2-thio-dihydrouridine, 2-thio-dihydropseudouridine, 2-methoxy-uridine, 2-methoxy-4-thio-uridine, 4-methoxy-pseudouridine, 4-methoxy-2-thio-pseudouridine, N1-methyl-pseudouridine, 3-(3-amino-3-carboxypropyl)uridine (acp³U), 1-methyl-3-(3-amino-3-carboxypropyl)pseudouridine (acp³ψ), 5-(isopentenylaminomethyl)uridine (inm⁵U), 5-(isopentenylaminomethyl)-2-thio-uridine (inm⁵s2U), α-thio-uridine, 2′-O-methyl-uridine (Um), 5,2′-O-dimethyl-uridine (m⁵Um), 2′-O-methyl-pseudouridine (ψm), 2-thio-2′-O-methyl-uridine (s2Um), 5-methoxycarbonylmethyl-2′-O-methyl-uridine (mem ⁵Um), 5-carbamoylmethyl-2′-O-methyl-uridine (ncm⁵Um), 5-carboxymethylaminomethyl-2′-O-methyl-uridine (cmnm⁵Um), 3,2′-O-dimethyl-uridine (m³Um), 5-(isopentenylaminomethyl)-2′-O-methyl-uridine (inm⁵Um), 1-thio-uridine, deoxythymidine, 2′-F-ara-uridine, 2′-F-uridine, 2′-OH-ara-uridine, 5-(2-carbomethoxyvinyl) uridine, 5-[3-(1-E-propenylamino)uridine, pyrazolo[3,4-d]pyrimidines, xanthine, and hypoxanthine.

[1577] Thymine

[1578] In some embodiments, the modified nucleobase is a modified thymine. Thymine differs from uracil in that thymine has a methyl group on carbon 5 of the 6-carbon ring, while uracil has a hydrogen in that position. In some embodiments, the modified thymine is derived from one of the modified uracils described in the previous paragraph, but having said methyl group instead of a hydrogen.

[1579] Cytosine

[1580] In some embodiments, the modified nucleobase is a modified cytosine. Exemplary nucleobases and nucleosides having a modified cytosine include without limitation 5-aza-cytidine, 6-aza-cytidine, pseudoisocytidine, 3-methyl-cytidine (m³C), N4-acetyl-cytidine (act), 5-formyl-cytidine (f⁵C), N4-methyl-cytidine (m⁴C), 5-methyl-cytidine (m⁵C), 5-halo-cytidine (e.g., 5-iodo-cytidine), 5-hydroxymethyl-cytidine (hm⁵C), 1-methyl-pseudoisocytidine, pyrrolo-cytidine, pyrrolo-pseudoisocytidine, 2-thio-cytidine (s2C), 2-thio-5-methyl-cytidine, 4-thio-pseudoisocytidine, 4-thio-1-methyl-pseudoisocytidine, 4-thio-1-methyl-1-deaza-pseudoisocytidine, 1-methyl-1-deaza-pseudoisocytidine, zebularine, 5-aza-zebularine, 5-methyl-zebularine, 5-aza-2-thio-zebularine, 2-thio-zebularine, 2-methoxy-cytidine, 2-methoxy-5-methyl-cytidine, 4-methoxy-pseudoisocytidine, 4-methoxy-1-methyl-pseudoisocytidine, lysidine (k²C), α-thio-cytidine, 2′-O-methyl-cytidine (Cm), 5,2′-O-dimethyl-cytidine (m⁵Cm), N4-acetyl-2′-O-methyl-cytidine (ac⁴Cm), N4,2′-O-dimethyl-cytidine (m⁴Cm), 5-formyl-2′-O-methyl-cytidine (f⁵Cm), N4,N4,2′-O-trimethyl-cytidine (m⁴2Cm), 1-thio-cytidine, 2′-F-ara-cytidine, 2′-F-cytidine, and 2′-OH-ara-cytidine.

[1581] Adenine

[1582] In some embodiments, the modified nucleobase is a modified adenine. Exemplary nucleobases and nucleosides having a modified adenine include without limitation 2-amino-purine, 2,6-diaminopurine, 2-amino-6-halo-purine (e.g., 2-amino-6-chloro-purine), 6-halo-purine (e.g., 6-chloro-purine), 2-amino-6-methyl-purine, 8-azido-adenosine, 7-deaza-adenine, 7-deaza-8-aza-adenine, 7-deaza-2-amino-purine, 7-deaza-8-aza-2-amino-purine, 7-deaza-2,6-diaminopurine, 7-deaza-8-aza-2,6-diaminopurine, 1-methyl-adenosine (m¹A), 2-methyl-adenine (m²A), N6-methyl-adenosine (m⁶A), 2-methylthio-N6-methyl-adenosine (ms2 m⁶A), N6-isopentenyl-adenosine (i⁶A), 2-methylthio-N6-isopentenyl-adenosine (ms²i⁶A), N6-(cis-hydroxyisopentenyl)adenosine (io⁶A), 2-methylthio-N6-(cis-hydroxyisopentenyl)adenosine (ms2io⁶A), N6-glycinylcarbamoyl-adenosine (g⁶A), N6-threonylcarbamoyl-adenosine (t⁶A), N6-methyl-N6-threonylcarbamoyl-adenosine (m⁶t⁶A), 2-methylthio-N6-threonylcarbamoyl-adenosine (ms²g⁶A), N6,N6-dimethyl-adenosine (m⁶2A), N6-hydroxynorvalylcarbamoyl-adenosine (hn⁶A), 2-methylthio-N6-hydroxynorvalylcarbamoyl-adenosine (ms2hn⁶A), N6-acetyl-adenosine (ac⁶A), 7-methyl-adenine, 2-methylthio-adenine, 2-methoxy-adenine, α-thio-adenosine, 2′-O-methyl-adenosine (Am), N⁶,2′-O-dimethyl-adenosine (m⁶Am), N⁶-Methyl-2′-deoxyadenosine, N6,N6,2′-O-trimethyl-adenosine (m⁶2Am), 1,2′-O-dimethyl-adenosine (m¹Am), 2′-O-ribosyladenosine (phosphate) (Ar(p)), 2-amino-N6-methyl-purine, 1-thio-adenosine, 8-azido-adenosine, 2′-F-ara-adenosine, 2′-F-adenosine, 2′-OH-ara-adenosine, and N6-(19-amino-pentaoxanonadecyl)-adenosine.

[1583] Guanine

[1584] In some embodiments, the modified nucleobase is a modified guanine. Exemplary nucleobases and nucleosides having a modified guanine include without limitation inosine (I), 1-methyl-inosine (m¹I), wyosine (imG), methylwyosine (mimG), 4-demethyl-wyosine (imG-14), isowyosine (imG2), wybutosine (yW), peroxywybutosine (o₂yW), hydroxywybutosine (OHyW), undermodified hydroxywybutosine (OHyW*), 7-deaza-guanosine, queuosine (Q), epoxyqueuosine (oQ), galactosyl-queuosine (galQ), mannosyl-queuosine (manQ), 7-cyano-7-deaza-guanosine (preQ₀), 7-aminomethyl-7-deaza-guanosine (preQ₁), archaeosine (G⁺), 7-deaza-8-aza-guanosine, 6-thio-guanosine, 6-thio-7-deaza-guanosine, 6-thio-7-deaza-8-aza-guanosine, 7-methyl-guanosine (m⁷G), 6-thio-7-methyl-guanosine, 7-methyl-inosine, 6-methoxy-guanosine, 1-methyl-guanosine (m′G), N2-methyl-guanosine (m²G), N2,N2-dimethyl-guanosine (m² 2G), N2,7-dimethyl-guanosine (m²,7G), N2, N2,7-dimethyl-guanosine (m²,2,7G), 8-oxo-guanosine, 7-methyl-8-oxo-guanosine, 1-meth thio-guanosine, N2-methyl-6-thio-guanosine, N2,N2-dimethyl-6-thio-guanosine, α-thio-guanosine, 2′-O-methyl-guanosine (Gm), N2-methyl-2′-O-methyl-guanosine (m²Gm), N2,N2-dimethyl-2′-O-methyl-guanosine (m² 2Gm), 1-methyl-2′-O-methyl-guanosine (m′Gm), N2,7-dimethyl-2′-O-methyl-guanosine (m²,7Gm), 2′-O-methyl-inosine (Im), 1,2′-O-dimethyl-inosine (m′Im), O⁶-phenyl-2′-deoxyinosine, 2′-O-ribosylguanosine (phosphate) (Gr(p)), 1-thio-guanosine, O⁶-methyl-guanosine, O⁶-Methyl-2′-deoxyguanosine, 2′-F-ara-guanosine, and 2′-F-guanosine.

[1585] Modified gRNAs

[1586] In some embodiments, the modified nucleic acids can be modified gRNAs. In some embodiments, gRNAs can be modified at the 3′ end. In this embodiment, the gRNAs can be modified at the 3′ terminal U ribose. For example, the two terminal hydroxyl groups of the U ribose can be oxidized to aldehyde groups and a concomitant opening of the ribose ring to afford a modified nucleoside as shown below:

[chemical structure]

wherein “U” can be an unmodified or modified uridine.

[1587] In another embodiment, the 3′ terminal U can be modified with a 2′3′ cyclic phosphate as shown below:

[chemical structure]

wherein “U” can be an unmodified or modified uridine.

[1588] In some embodiments, the gRNA molecules may contain 3′ nucleotides which can be stabilized against degradation, e.g., by incorporating one or more of the modified nucleotides described herein. In this embodiment, e.g., uridines can be replaced with modified uridines, e.g., 5-(2-amino)propyl uridine, and 5-bromo uridine, or with any of the modified uridines described herein; adenosines and guanosines can be replaced with modified adenosines and guanosines, e.g., with modifications at the 8-position, e.g., 8-bromo guanosine, or with any of the modified adenosines or guanosines described herein. In some embodiments, deaza nucleotides, e.g., 7-deaza-adenosine, can be incorporated into the gRNA. In some embodiments, O- and N-alkylated nucleotides, e.g., N6-methyl andenosine, can be incorporated into the gRNA. In some embodiments, sugar-modified ribonucleotides can be incorporated, e.g., wherein the 2′ OH-group is replaced by a group selected from H, —OR, —R (wherein R can be, e.g., alkyl, cycloalkyl, aryl, aralkyl, heteroaryl or sugar), halo, —SH, —SR (wherein R can be, e.g., alkyl, cycloalkyl, aryl, aralkyl, heteroaryl or sugar), amino (wherein amino can be, e.g., NH₂; alkylamino, dialkylamino, heterocyclyl, arylamino, diarylamino, heteroarylamino, diheteroarylamino, or amino acid); or cyano (—CN). In some embodiments, the phosphate backbone can be modified as described herein, e.g., with a phosphothioate group. In some embodiments, the nucleotides in the overhang region of the gRNA can each independently be a modified or unmodified nucleotide including, but not limited to 2′-sugar modified, such as, 2-F 2′-O-methyl, thymidine (T), 2′-O-methoxyethyl-5-methyluridine (Teo), 2′-O-methoxyethyladenosine (Aeo), 2′-O-methoxyethyl-5-methylcytidine (m5Ceo), and any combinations thereof.

[1589] In an embodiment, one or more or all of the nucleotides in single stranded RNA molecule, e.g., a gRNA molecule, are deoxynucleotides.

[1590] In another aspect, methods and compositions discussed herein provide methods and compositions for gene editing by using a gRNA molecule which comprises a polyA tail. In one embodiment, a polyA tail of undefined length ranging from 1 to 1000 nucleotide(s) is added enzymatically using a polymerase such as E. coli polyA polymerase (E-PAP). In one embodiment, the polyA tail of a specified length (e.g., 1, 5, 10, 20, 30, 40, 50, 60, 100, or 150 nucleotides (SEQ ID NO: 2289)) is encoded on a DNA template and transcribed with the gRNA via an RNA polymerase (e.g., T7 RNA polymerase). In one embodiment, a polyA tail of defined length (e.g., 1, 5, 10, 20, 30, 40, 50, 60, 100, or 150 nucleotides (SEQ ID NO: 2289)) is synthesized as a synthetic oligonucleotide and ligated on the 3′ end of the gRNA with either an RNA ligase or a DNA ligase with our without a splinted DNA oligonucleotide complementary to the guide RNA and the polyA oligonucleotide. In one embodiment, the entire gRNA including a defined length of polyA tail is made synthetically, in one or several pieces, and, if made in more than one piece, ligated together by either an RNA ligase or a DNA ligase with or without a splinted oligonucleotide.

[1591] Modified Template Nucleic Acids

[1592] In some embodiments, the template nucleic acid comprises chemical modifications. These modifications may, e.g., increase the stability or half-life of the nucleic acid or reduce the innate immune response to the nucleic acid.

[1593] In some embodiments, the template nucleic acid can be modified at one or two 3′ ends. In this embodiment, the template nucleic acid can be modified at the 3′ nucleotide. For example, the two terminal hydroxyl groups of the 3′-most sugar can be oxidized to aldehyde groups and a concomitant opening of the ring to afford a modified nucleoside, analogous to the first ribonucleotide shown in the previous section entitled “Modified gRNAs”.

[1594] In another embodiment, the 3′ terminal sugar can be modified with a 2′3′ cyclic phosphate, analogous to the second ribonucleotide shown in the previous section entitled “Modified gRNAs”.

[1595] In some embodiments, the template nucleic acid may contain 3′ nucleotides which can be stabilized against degradation, e.g., by incorporating one or more of the modified nucleotides described herein. In this embodiment, e.g., thymines can be replaced with any of the modified thymines described herein; adenosines and guanosines can be replaced with modified adenosines and guanosines, e.g., with modifications at the 8-position, e.g., 8-bromo guanosine, or with any of the modified adenosines or guanosines described herein. In some embodiments, deaza nucleotides, e.g., 7-deaza-adenosine, can be incorporated into the template nucleic acid. In some embodiments, O- and N-alkylated nucleotides, e.g., N6-methyl andenosine, can be incorporated into the template nucleic acid. In some embodiments, sugar-modified deoxyribonucleotides can be incorporated, e.g., wherein the 2′ H-group is replaced by a group selected from OH, —OR, —R (wherein R can be, e.g., alkyl, cycloalkyl, aryl, aralkyl, heteroaryl or sugar), halo, —SH, —SR (wherein R can be, e.g., alkyl, cycloalkyl, aryl, aralkyl, heteroaryl or sugar), amino (wherein amino can be, e.g., NH₂; alkylamino, dialkylamino, heterocyclyl, arylamino, diarylamino, heteroarylamino, diheteroarylamino, or amino acid); or cyano (—CN). In some embodiments, the phosphate backbone can be modified as described herein, e.g., with a phosphothioate group. In some embodiments, the template nucleic acid comprises an overhang region, and the nucleotides in the overhang region can each independently be a modified or unmodified nucleotide including, but not limited to 2′-sugar modified, such as, 2-F 2′-O-methyl, 2′-O-methoxyethyl-5-methyluridine (Teo), 2′-O-methoxyethyladenosine (Aeo), 2′-O-methoxyethyl-5-methylcytidine (m5Ceo), and any combinations thereof.

[1596] In some embodiments, the template nucleic acid is nicked, e.g., at the same position as a nick or DSB on target nucleic acid. While not wishing to be bound by theory, in some embodiments, a nick on a double stranded template nucleic acid stimulates HDR. In some embodiments, one or more nicks on the template nucleic acid are on the strand that is complementary to the intact target strand; in embodiments, one or more nicks on the template nucleic acid are on the strand that is complementary to the nicked target stand.

[1597] miRNA Binding Sites

[1598] MicroRNAs (or miRNAs) are naturally occurring cellular 19-25 nucleotide long noncoding RNAs. They bind to nucleic acid molecules having an appropriate miRNA binding site, e.g., in the 3′ UTR of an mRNA, and down-regulate gene expression. While not wishing to be bound by theory it is believed that the down regulation is either by reducing nucleic acid molecule stability or by inhibiting translation. An RNA species disclosed herein, e.g., an mRNA encoding Cas9 can comprise an miRNA binding site, e.g., in its 3′UTR. The miRNA binding site can be selected to promote down regulation of expression is a selected cell type. By way of example, the incorporation of a binding site for miR-122, a microRNA abundant in liver, can inhibit the expression of the gene of interest in the liver.

### XI. Nucleic Acids; Kits; Methods of Production

[1599] In some aspects, disclosed herein is a nucleic acid, e.g., an isolated or non-naturally occurring nucleic acid, e.g., DNA, that comprises a sequence that encodes a gRNA molecule comprising a targeting domain that is complementary with a target domain as disclosed herein. In an embodiment, the nucleic acid encodes a gRNA molecule, e.g., a first gRNA molecule, comprising a targeting domain configured to provide a cleavage event, e.g., a double strand break or a single strand break, sufficiently close to a region desired to be altered to allow alteration, e.g., alteration associated with HDR of the region desired to be altered.

[1600] A nucleic acid disclosed herein may comprise (a) a sequence that encodes a gRNA molecule comprising a targeting domain that is complementary with a target domain as disclosed herein; (b) a sequence that encodes a Cas9 molecule; and further comprises (c) (i) a sequence that encodes a second gRNA molecule described herein having a targeting domain that is complementary to a second target domain, and optionally, (ii) a sequence that encodes a third gRNA molecule described herein having a targeting domain that is complementary to a third target domain; and optionally, (iii) a sequence that encodes a fourth gRNA molecule described herein having a targeting domain that is complementary to a fourth target domain.

[1601] In some embodiments, when a region that is desired to be altered is corrected by HDR (e.g., alt-HR, SSA, or HR), the nucleic acid encodes (a) a sequence that encodes a gRNA molecule comprising a targeting domain that is complementary with a target domain gene as disclosed herein; (b) a sequence that encodes a Cas9 molecule; (c) a template nucleic acid, (d) a HDR enhancer, and optionally, (e) (i) a sequence that encodes a second gRNA molecule described herein having a targeting domain that is complementary to a second target domain, and further optionally, (ii) a sequence that encodes a third gRNA molecule described herein having a targeting domain that is complementary to a third target domain; and still further optionally, (iii) a sequence that encodes a fourth gRNA molecule described herein having a targeting domain that is complementary to a fourth target domain.

[1602] As described above, a nucleic acid may comprise (a) a sequence encoding a gRNA molecule, and (b) a sequence encoding a Cas9 molecule. In some embodiments, (a) and (b) are present on the same nucleic acid molecule, e.g., the same vector, e.g., the same viral vector, e.g., the same adeno-associated virus (AAV) vector. In an embodiment, the nucleic acid molecule is an AAV vector. Exemplary AAV vectors that may be used in any of the described compositions and methods include an AAV2 vector, a modified AAV2 vector, an AAV3 vector, a modified AAV3 vector, an AAV6 vector, a modified AAV6 vector, an AAV8 vector and an AAV9 vector.

[1603] In other embodiments, (a) is present on a first nucleic acid molecule, e.g., a first vector, e.g., a first viral vector, e.g., a first AAV vector; and (b) is present on a second nucleic acid molecule, e.g., a second vector, e.g., a second vector, e.g., a second AAV vector. The first and second nucleic acid molecules may be AAV vectors.

[1604] In some embodiments, all of (a), (b), (c), (d), and optionally (e) are on the same vector, e.g., the same AAV vector. (It is understood that when the HDR enhancer (d) is on a nucleic acid or vector, it is implied that the HDR-enhancer molecule is capable of being encoded on a vector, e.g., the HDR-enhancer may be a protein, a ribozyme, a siRNA, an RNAi oligonucleotides, and the like.) In some embodiments, all of (a), (b), (c), (d), and optionally (e) are on different vectors, e.g., one or more AAV vectors. In some embodiments, two or more, e.g., two, three, or four of (a), (b), (c), (d), and optionally (e) are on the same vector, e.g., an AAV vector, and the remainder are on one or more other vectors, e.g., one or more AAV vectors. In some embodiments, (a) and (b) are on the same vector, e.g., an AAV vector; (a) and (c) are on the same vector, e.g., an AAV vector, (a) and (d) are on the same vector, e.g., an AAV vector, (b) and (c) are on the same vector, e.g., an AAV vector, (b) and (d) are on the same vector, e.g., an AAV vector, or (c) and (d) are on the same vector, e.g., an AAV vector.

[1605] The nucleic acids described herein may comprise a promoter operably linked to the sequence that encodes the gRNA molecule of (a), e.g., a promoter described herein. The nucleic acid may further comprise a second promoter operably linked to the sequence that encodes the second, third and/or fourth gRNA molecule of (e), e.g., a promoter described herein. The promoter and second promoter differ from one another. In some embodiments, the promoter and second promoter are the same.

[1606] The nucleic acids described herein may further comprise a promoter operably linked to the sequence that encodes the Cas9 molecule of (b), e.g., a promoter described herein.

[1607] The nucleic acids described herein may further comprise a promoter operably linked to the sequence that encodes the HDR-enhancer of (d), e.g., a promoter described herein.

[1608] In another aspect, disclosed herein is a kit comprising one or more, e.g., all of the following:
[1609] (a) gRNA molecule described herein, or nucleic acid that encodes the gRNA;
[1610] (b) a Cas9 molecule, e.g., a Cas9 molecule described herein, or a nucleic acid or mRNA that encodes the Cas9;
[1611] (c) a template nucleic acid; and
[1612] (d) an HDR-enhancer.

[1613] In an embodiment, the kit comprises nucleic acid, e.g., an AAV vector, that encodes one or more of (a), (b), (c), and (d).

### XII. Methods of Treatment

[1614] A genetic disease is caused by a mutation in the patient's genome. Often, the mutation results in a change in a protein, e.g., an amino acid substitution or a truncation. Genetic diseases can be dominant, i.e., one mutant gene is sufficient to cause the disease, or recessive, where a patient with one copy of the mutant gene is an asymptomatic carrier, and two copies of the mutant gene are necessary for the disease to result.

[1615] Disclosed herein are the approaches to treat or prevent genetic diseases, using the compositions and methods described herein.

[1616] One approach to treat or prevent genetic diseases is to repair (i.e., correct) one or more mutations in the disease-causing gene by HDR. In this approach, mutant allele(s) are corrected and restored to wild type state. While not wishing to be bound by theory, it is believed that correction of the mutation to the corresponding wild-type sequence restores wild type protein production within the relevant cell type. The method described herein can be performed in all cell types.

[1617] In an embodiment, one mutant allele is repaired in the subject. For example, in a patient with an autosomal dominant genetic disease, the sole mutant allele in the cell is corrected so that the cell becomes wild-type at both loci. As another example, in a patient with an autosomal recessive genetic disease, one of the two mutant alleles in the cell is corrected, and so the cell becomes heterozygous, which is sufficient for normal functioning. As a recessive genetic disease only displays a phenotype when both alleles are mutated, repair of a single allele is adequate for a cure. In another embodiment, both mutant alleles are repaired in the subject. In either situation, the subjects can be cured of disease.

[1618] Correction of a mutation in the relevant gene may be performed prior to disease onset (e.g., prior to the appearance of symptoms) or after disease onset, for instance, early in the disease course.

[1619] In an embodiment, the method comprises initiating treatment of a subject prior to disease onset. In an embodiment, the method comprises initiating treatment of a subject after disease onset. In an embodiment, the method comprises initiating treatment of a subject well after disease onset, e.g., 1, 2, 3, 4, 5, 6, 7, 8, 9, 10, 12, 24, or 36 months after onset of the disease. While not wishing to be bound by theory it is believed that this may be effective if subjects did not present to physician until well into the course of illness.

[1620] In an embodiment, the method comprises initiating treatment of a subject in an advanced stage of disease.

[1621] Overall, initiation of treatment for subjects at all stages of disease is expected to prevent negative consequences of disease and be of benefit to subjects.

[1622] In an embodiment, the method comprises initiating treatment of a subject prior to disease expression. In an embodiment, the method comprises initiating treatment of a subject in an early stage of disease, e.g., when a subject has tested positive for the disease but has no signs or symptoms associated with the disease.

[1623] In an embodiment, the method comprises initiating treatment of a subject who has tested positive for the mutation underlying the disease, based on diagnosis via electrophoresis, genotyping, family history or other diagnostic criteria.

### EXAMPLES

[1624] The following Examples are merely illustrative and are not intended to limit the scope or content of the invention in any way.

Introduction: Pathway Choice after DNA Double-Stranded Break Formation

[1625] After the formation of a DNA double-stranded break (DSB), the major decision point affecting DNA repair pathway choice is whether or not the DNA ends are endo- and exonucleolytically processed in a process referred to as end resection (FIG. 1). When no end resection takes places, the repair pathway engaged to repair the DSB is referred to as classical non-homologous end joining (C-NHEJ). The C-NHEJ repair pathway leads to either perfect repair of the DSBs, in which case the locus is restored without sequence alterations, or to the formation of small insertions and deletions.

[1626] In contrast, if the end resection machinery processes the DSB, a 3′ overhang is exposed, which engages in homology search. When the end resection is extensive, the exposed 3′ overhang can undergo strand invasion of highly homologous sequences, followed by repair of the DSB by a homology-dependent recombination (HDR) pathway. The HDR pathway comprises homologous recombination (HR), single strand annealing (SSA), and a potential third, not yet fully characterized alternative-HR pathway (“alt-HR”).

[1627] Yet another not completely characterized class of pathways that can engage the repair of DSBs after resection is initiated is referred to as alternative non-homologous end joining (ALT-NHEJ). Examples of pathways that are categorized as ALT-NHEJ include blunt end-joining (blunt EJ) and microhomology mediated end joining (MMEJ) leading to deletions, as well as synthesis dependent micro homology mediated end joining (SD-MMEJ), leading to the formation of insertions.

Overview of Different Cas9 Variants and gRNA Combinations

[1628] The wild-type (wt) Cas9 enzyme is directed to double-stranded DNA with a gRNA complementary to the desired genomic location, with the only requirement being the presence of a protospacer-adjacent motif (PAM) 3′ of the DNA target site. A wt Cas9 molecule then introduces two single nicks on opposite strands through the coordinated catalytic activity of the HNH and RuvC catalytic domains, leading to the formation of a blunt DSB (middle panel of FIG. 2). The HNH domain cleaves the strand complementary to the gRNA, while the RuvC domain places a cleavage event on the non-complementary strand.

[1629] Mutations in the HNH or RuvC domains can lead to the inactivation of their respective catalytic activities, thereby preventing the placement of a cleavage event on their respective target DNA strand. For example, a mutation in the RuvC domain of Cas9 (for example the D10A mutation of S. pyogenes Cas9) leads to the placement of a cleavage event only on the gRNA complementary strand through the remaining HNH domain activity when a single gRNA is used (upper panel, middle of FIG. 2)). In contrast, an inactivating mutation of the HNH domain (for example the N863A mutation of S. pyogenes Cas9) leads to the cleavage of the non-complementary strand by the RuvC domain when a single gRNA is used (lower panel, middle of FIG. 2). The Cas9 catalytic domain mutants can also be used in combination with two gRNAs, which direct the single cleavage events to two different locations. For example, two gRNAs targeting opposite strands, in which PAMs face outwards, lead to the formation of 5′ protruding arms with D10A Cas9 mutants (RuvC domain catalytic mutant), in which the HNH domains place cleavage events on the gRNA complementary strands (upper panel, right of FIG. 2). Similarly, two gRNAs that direct the N863A Cas9 nickase (HNH domain catalytic mutant) to two opposite DNA strands in an orientation in which the PAMs face outwards, lead to the formation of 3′ protruding arms induced by non-complementary strand cleavage by the RuvC domains (lower panel, right of FIG. 2).

### Example 1: Cleavage by Different Cas9 Variants Leads to Different Repair Outcomes

[1630] The different repair outcomes induced in response to DSBs introduced by different Cas9 variants were examined (FIG. 3). The CRISPR/Cas9 system was used to target the human HBB gene in the region of the sickle cell anemia-causing mutation. Blunt DSBs and dual-nicks in which the nicks are placed on opposite strands and with PAMs facing outwards, leaving either 3′ or 5′ overhangs as described above and as shown in FIG. 2, were introduced by utilizing the wild type Cas9 nuclease, as well as the N863A or D10A Cas9 nickase mutants. Several different DNA repair outcomes including, e.g., indel mutations resulting from non-homologous end-joining, alternative NHEJ, HDR homologous recombination (HR) using the closely related HBD gene as an endogenous template, or homology dependent repair using an exogenous donor sequence were characterized.

[1631] Specifically, U20S cells were electroporated with 200 ng of each gRNA (HBB-8 and HBB-15), 750 ng of plasmid that encodes wild type Cas9 or mutant Cas9 (D10A or N863A). For some conditions, 50 pmols of single stranded oligonucleotide donor (ss-ODN) was included. Cells were collected 6 days after electroporation and genomic DNA was extracted. PCR amplification of the HBB locus was performed and subcloned into a Topo Blunt Vector. For each condition in each experiment (more the 4 independent samples) 98 colonies were analyses were sequenced with Sanger sequencing and scored for either insertions, deletions, gene conversion or gene corrections. In the absence of an exogenous ss-ODN (FIG. 3), a blunt DSB induced by WT Cas9 leads to the formation of predominantly (˜3/4 of all editing events) small deletions, followed by gene conversion and insertions. This is consistent with the notion that wt Cas9 generates blunt ends which are preferentially repaired by c-NHEJ. In contrast, DSBs induced by the N863A nickase mutant that leads to the formation of 3′ overhangs with the gRNA configuration used, are predominantly repaired by insertions in which the inserted sequence was a duplication of the overhang sequence (FIG. 3). This repair signature is indicative of repair by the ALT-NHEJ pathway. Lastly, the DSBs harboring a 5′ overhang induced by the D10A nickase mutants are predominantly repaired by the gene conversion pathway, which us a subset of the resection dependent HDR pathway. While the overall modification distribution remains similar in the presence of an exogenous ss-ODN (right panel of FIG. 4), we found that the most efficient repair using the ss-ODN as a template occurs in the presence of D10A induced lesions.

[1632] In summary, Cas9 nickases (D10A and N863A) showed comparable levels of efficacy compared to wildtype Cas9. However, different DNA ends engage different repair pathways. Wildtype Cas9 generates blunt ends, which are preferentially repaired by canonical NHEJ. Use of a Cas9 nickase with two gRNAs generates either 3′ or 5′ overhangs, which are most likely not suitable substrates to be repaired by canonical NHEJ but can be repaired by alternative pathways.

[1633] The 5′ protruding end was mostly repaired through a mechanism called gene conversion in which the HBB gene is repaired by using the HBD locus as a template. In addition, the D10A Nickase leaving a 5′ protruding arm is advantageous to promote HDR mediated by SS-ODN.

### Example 2: WT Cas9-Induced Blunt DSBs are Repaired Through the C-NHEJ Pathway

[1634] In this experiment, the deletions occurring in response to different end structures induced by different Cas9 variants were analyzed. Initially, U2OS cells were electroporated with 200 ng of each gRNA (8 and 15), 750 ng of plasmid that encodes wild type Cas9 or mutant Cas9 (D10A or N863A). Cells were collected 6 days after electroporation and genomic DNA was extracted. PCR amplification of the HBB locus was performed and subcloned into a Topo Blunt Vector. For each condition in each experiment (more the 4 independent samples), 98 colonies were analyses were sequenced with Sanger sequencing. Deletions detected by Sanger sequencing were scored for the exact number of nucleotides deleted. The resulting deletion length data was represented on a histogram plot (FIG. 5).

[1635] Deletions occurring in response to blunt DSBs induced by the wt Cas9 molecule are predominantly small in size (green bars), which is indicative of repair through the c-NHEJ pathway. In contrast, the deletions observed in response to the 5′ and 3′ protruding DSBs induced by the D10A and N863A Cas9 variants were mostly larger in nature, indicating the activity of a different repair process.

### Example 3: Modulation of Repair Pathway Choice by Inhibition of C-NHEJ Factors in the Context of a Wild-Type Cas9

[1636] Blunt DSBs get most frequently repaired by C-NHEJ, resulting in small deletions. C-NHEJ is a pathway that repairs DSBs that have not undergone extensive end processing by end resection. Many of the main components of the C-NHEJ pathway have been previously characterized (FIG. 6). The proteins 53BP1, Rif1, and PTIP are required for the initial pathway choice by preventing end resection from occurring. Proteins involved in the C-NHEJ repair process itself include the Ku70/Ku80 complex, DNA-PK, Artemis, Ligase 4, XRCC4 and XLF. Transient inhibition or down regulation of the Ku70/Ku80 complex, DNA-PK, Artemis, Ligase 4, XRCC4 and XLF is expected to yield to a shift in the balance from C-NHEJ towards alternative-NHEJ or HDR.

[1637] An alternative approach to enhance repair pathways other than C-NHEJ is to downregulate or transiently inhibit the proteins 53BP1, Rif1, and PtIP, which prevent end resection. It is expected that transient inhibition or down regulation of proteins that prevent end resection leads to the initiation of end resection and thereby influences pathway choice towards the resection dependent ALT-NHEJ and HDR pathways. Cells have also evolved pathways to protect against unwanted recombination. These anti-recombination factors include proteins such as Fbh1, RTEL, PARI and Rap80, as well as micro RNAs such as miRNA155, 545, 107, 1255, 148 and 193. A transient inhibition or down regulation of these proteins or inhibition of miRNAs with their respective antisense miRNAs are expected to increase usage of recombination-dependent pathways such as HDR.

### Example 4: Overexpression of a Dominant Negative Form of 53BP1 Will Enhance Repair of DSBs by Resection Dependent Pathways

[1638] U2OS cells are electroporated with 200 ng of each gRNA (8 and 15), 750 ng of plasmid that encodes wild type Cas9, and a plasmid that encodes a dominant negative form of 53BP1 (see sequences, below) or a non-coding control plasmid, as an example of the inhibition of c-NHEJ. Cells are collected 6 days after electroporation and genomic DNA is extracted. PCR amplification of the HBB locus is performed and is subcloned into a Topo Blunt Vector. For each condition in each experiment colonies are sequenced with Sanger sequencing and HDR levels are scored.

53BP1 dominant negative Mutant 1: 53bp1_(1221-
1718)-with ATG start and TAA stop
AA-seq
(SEQ ID NO: 2250)
MGEEEFDMPQPPHGHVLHRHMRTIREVRTLVTRVITDVYYVDGTEVERKV
TEETEEPIVECQECETEVSPSQTGGSSGDLGDISSFSSKASSLHRTSSGT
SLSAMHSSGSSGKGAGPLRGKTSGTEPADFALPSSRGGPGKLSPRKGVSQ
TGTPVCEEDGDAGLGIRQGGKAPVTPRGRGRRGRPPSRTTGTRETAVPGP
LGIEDISPNLSPDDKSFSRVVPRVPDSTRRTDVGAGALRRSDSPEIPFQA
AAGPSDGLDASSPGNSFVGLRVVAKWSSNGYFYSGKITRDVGAGKYKLLF
DDGYECDVLGKDILLCDPIPLDTEVTALSEDEYFSAGVVKGHRKESGELY
YSIEKEGQRKWYKRMAVILSLEQGNRLREQYGLGPYEAVTPLTKAADISL
DNLVEGKRKRRSNVSSPATPTASSSSSTTPTRKITESPRASMGVLSGKRK
LITSEEERSPAKRGRKSATVKPGAVGAGEFVSPCESGDNTGEPSALEEQ*
Nucleotide Seq
(SEQ ID NO: 2251)
ATGGGAGAAGAAGAGTTTGATATGCCTCAGCCTCCACATGGCCATGTCTT
ACATCGTCACATGAGAACAATCCGGGAAGTACGCACACTTGTCACTCGTG
TCATTACAGATGTGTATTATGTGGATGGAACAGAAGTAGAAAGAAAAGTA
ACTGAGGAGACTGAAGAGCCAATTGTAGAGTGTCAGGAGTGTGAAACTGA
AGTTTCCCCTTCACAGACTGGGGGCTCCTCAGGTGACCTGGGGGATATCA
GCTCCTTCTCCTCCAAGGCATCCAGCTTACACCGCACATCAAGTGGGACA
AGTCTCTCAGCTATGCACAGCAGTGGAAGCTCAGGGAAAGGAGCCGGACC
ACTCAGAGGGAAAACCAGCGGGACAGAACCCGCAGATTTTGCCTTACCCA
GCTCCCGAGGAGGCCCAGGAAAACTGAGTCCTAGAAAAGGGGTCAGTCAG
ACAGGGACGCCAGTGTGTGAGGAGGATGGTGATGCAGGCCTTGGCATCAG
ACAGGGAGGGAAGGCTCCAGTCACGCCTCGTGGGCGTGGGCGAAGGGGCC
GCCCACCTTCTCGGACCACTGGAACCAGAGAAACAGCTGTGCCTGGCCCC
TTGGGCATAGAGGACATTTCACCTAACTTGTCACCAGATGATAAATCCTT
CAGCCGTGTCGTGCCCCGAGTGCCAGACTCCACCAGACGAACAGATGTGG
GTGCTGGTGCTTTGCGTCGTAGTGACTCTCCAGAAATTCCTTTCCAGGCT
GCTGCTGGCCCTTCTGATGGCTTAGATGCCTCCTCTCCAGGAAATAGCTT
TGTAGGGCTCCGTGTTGTAGCCAAGTGGTCATCCAATGGCTACTTTTACT
CTGGGAAAATCACACGAGATGTCGGAGCTGGGAAGTATAAATTGCTCTTT
GATGATGGGTACGAATGTGATGTGTTGGGCAAAGACATTCTGTTATGTGA
CCCCATCCCGCTGGACACTGAAGTGACGGCCCTCTCGGAGGATGAGTATT
TCAGTGCAGGAGTGGTGAAAGGACATAGGAAGGAGTCTGGGGAACTGTAC
TACAGCATTGAAAAAGAAGGCCAAAGAAAGTGGTATAAGCGAATGGCTGT
CATCCTGTCCTTGGAGCAAGGAAACAGACTGAGAGAGCAGTATGGGCTTG
GCCCCTATGAAGCAGTAACACCTCTTACAAAGGCAGCAGATATCAGCTTA
GACAATTTGGTGGAAGGGAAGCGGAAACGGCGCAGTAACGTCAGCTCCCC
AGCCACCCCTACTGCCTCCAGTAGCAGCAGCACAACCCCTACCCGAAAGA
TCACAGAAAGTCCTCGTGCCTCCATGGGAGTTCTCTCAGGCAAAAGAAAA
CTTATCACTTCTGAAGAGGAACGGTCCCCTGCCAAGCGAGGTCGCAAGTC
TGCCACAGTAAAACCTGGTGCAGTAGGGGCAGGAGAGTTTGTGAGCCCCT
GTGAGAGTGGAGACAACACCGGTGAACCCTCTGCCCTGGAAGAGCAGTAA
53BP1 dominant negative Mutant 2: 53bp1_(1052-
1710)-with ATG start and TAA stop
AA-seq
(SEQ ID NO: 2252)
MDPPTTPIRGNLLHFPSSQGEEEKEKLEGDHTIRQSQQPMKPISPVKDPV
SPASQKMVIQGPSSPQGEAMVTDVLEDQKEGRSTNKENPSKALIERPSQN
NIGIQTMECSLRVPETVSAATQTIKNVCEQGTSTVDQNFGKQDATVQTER
GSGEKPVSAPGDDTESLHQGEEEFDMPQPPHGHVLHRHMRTIREVRTLVT
RVITDVYYVDGTEVERKVTEETEEPIVECQECETEVSPSQTGGSSGDLGD
ISSFSSKASSLHRTSSGTSLSAMHSSGSSGKGAGPLRGKTSGTEPADFAL
PSSRGGPGKLSPRKGVSQTGTPVCEEDGDAGLGIRQGGKAPVTPRGAAAG
PSDGLDASSPGNSFVGLRVVAKWSSNGYFYSGKITRDVGAGKYKLLFDDG
YECDVLGKDILLCDPIPLDTEVTALSEDEYFSAGVVKGHRKESGELYYSI
EKEGQRKWYKRMAVILSLEQGNRLREQYGLGPYEAVTPLTKAADISLDNL
VEGKRKRRSNVSSPATPTASSSSSTTPTRKITESPRASMGVLSGKRKLIT
SEEERSPAKRGRKSATVKPGAVGAGEFVSPCESGDNTG*
Nucleotide Seq
(SEQ ID NO: 2253)
ATGGATCCCCCCACCACACCCATCAGGGGGAACTTGCTCCACTTTCCAAG
TTCTCAAGGAGAAGAGAAAGAAAAATTGGAGGGTGACCATACAATCAGGC
AGAGTCAACAGCCTATGAAGCCCATTAGTCCTGTCAAGGACCCTGTTTCT
CCTGCTTCCCAGAAGATGGTCATACAAGGGCCATCCAGTCCTCAAGGAGA
GGCAATGGTGACAGATGTGCTAGAAGACCAGAAAGAAGGACGGAGTACTA
ATAAGGAAAATCCTAGTAAGGCCTTGATTGAAAGGCCCAGCCAAAATAAC
ATAGGAATCCAAACCATGGAGTGTTCCTTGAGGGTCCCAGAAACTGTTTC
AGCAGCAACCCAGACTATAAAGAATGTGTGTGAGCAGGGGACCAGTACAG
TGGACCAGAACTTTGGAAAGCAAGATGCCACAGTTCAGACTGAGAGGGGG
AGTGGTGAGAAACCAGTCAGTGCTCCTGGGGATGATACAGAGTCGCTCCA
TAGCCAGGGAGAAGAAGAGTTTGATATGCCTCAGCCTCCACATGGCCATG
TCTTACATCGTCACATGAGAACAATCCGGGAAGTACGCACACTTGTCACT
CGTGTCATTACAGATGTGTATTATGTGGATGGAACAGAAGTAGAAAGAAA
AGTAACTGAGGAGACTGAAGAGCCAATTGTAGAGTGTCAGGAGTGTGAAA
CTGAAGTTTCCCCTTCACAGACTGGGGGCTCCTCAGGTGACCTGGGGGAT
ATCAGCTCCTTCTCCTCCAAGGCATCCAGCTTACACCGCACATCAAGTGG
GACAAGTCTCTCAGCTATGCACAGCAGTGGAAGCTCAGGGAAAGGAGCCG
GACCACTCAGAGGGAAAACCAGCGGGACAGAACCCGCAGATTTTGCCTTA
CCCAGCTCCCGAGGAGGCCCAGGAAAACTGAGTCCTAGAAAAGGGGTCAG
TCAGACAGGGACGCCAGTGTGTAGGAGGATGGTGATGCAGGCCTTGGCAT
CAGACAGGGAGGGAAGGCTCCAGTCACGCCTCGTGGGCGTGGGCGAAGGG
GCCGCCCACCTTCTCGGACCACTGGAACCAGAGAAACAGCTGTGCCTGGC
CCCTTGGGCATAGAGGACATTTCACCTAACTTGTCACCAGATGATAAATC
CTTCAGCCGTGTCGTGCCCCGAGTGCCAGACTCCACCAGACGAACAGATG
TGGGTGCTGGTGCTTTGCGTCGTAGTGACTCTCCAGAAATTCCTTTCCAG
GCTGCTGCTGGCCCTTCTGATGGCTTAGATGCCTCCTCTCCAGGAAATAG
CTTTGTAGGGCTCCGTGTTGTAGCCAAGTGGTCATCCAATGGCTACTTTT
ACTCTGGGAAAATCACACGAGATGTCGGAGCTGGGAAGTATAAATTGCTC
TTTGATGATGGGTACGAATGTGATGTGTTGGGCAAAGACATTCTGTTATG
TGACCCCATCCCGCTGGACACTGAAGTGACGGCCCTCTCGGAGGATGAGT
ATTTCAGTGCAGGAGTGGTGAAAGGACATAGGAAGGAGTCTGGGGAACTG
TACTACAGCATTGAAAAAGAAGGCCAAAGAAAGTGGTATAAGCGAATGGC
TGTGATCCTGTCCTTGGAGCAAGGAAACAGACTGAGAGAGCAGTATGGGC
TTGGCCCCTATGAAGCAGTAACACCTCTTACAAAGGCAGCAGATATCAGC
TTAGACAATTTGGTGGAAGGGAAGCGGAAACGGCGCAGTAACGTCAGCTC
CCCAGCCACCCCTACTGCCTCCAGTAGCAGCAGCACAACCCCTACCCGAA
AGATCACAGAAAGTCCTCGTGCCTCCATGGGAGTTCTCTCAGGCAAAAGA
AAACTTATCACTTCTGAAGAGGAACGGTCCCCTGCCAAGCGAGGTCGCAA
GTCTGCCACAGTAAAACCTGGTGCAGTAGGGGCAGGAGAGTTTGTGAGCC
CCTGTGAGAGTGGAGACAACACCGGTTAA

### Example 5: Down Regulation of Artemis Expression Leads to Enhanced Gene Correction Efficiency by HDR

[1639] Artemis is a protein involved in the c-NHEJ repair pathway. To examine whether Artemis plays a role in the repair of CRISPR/Cas9 induced blunt DSBs, Artemis was downregulated using a CRISPR/Cas9 mediated knockout approach (FIG. 7). Specifically, U2OS cells were electroporated with 19 pmols of S. aureus Cas9 complexed with a gRNA directing the Cas9 protein to the Artemis locus. A second set of cells were electroporated with S. aureus Cas9 complexed with non-targeting control gRNA. Samples were collected on day 4 for Western Blot to assess the level of down regulation. On day 7, cells with down regulated Artemis expression and control cells were electroporated with 200 ng of gRNA8, 750 ng of plasmid that encodes wild type Cas9, and 50 pmols of a ss-ODN. Cells were collected 5 days after electroporation and genomic DNA was extracted. PCR amplification of the HBB locus was performed and the resulting products were subcloned into a Topo Blunt Vector. For each condition in each experiment, colonies were sequenced with Sanger sequencing. Upon down regulation of Artemis, an increase in HDR-mediated gene correction efficiency was observed (FIG. 7).

### Example 6: Down Regulation of Anti-Recombination Factor Rap80 to Enhance DNA Repair by HDR

[1640] U2OS cells were electroporated with 200 ng of each gRNA (8 and 15), 750 ng of plasmid that encodes wild type and 30 pmols of an siRNA targeting the Rap80 transcript as 40 an example of down regulation of anti recombination factors or a control siRNA. Cells were collected for a Western Blot assay to check Rap80 protein levels 4 days after electroporation (FIG. 8), and genomic DNA is extracted. PCR amplification of the HBB locus is performed and is subcloned into a Topo Blunt Vector. For each condition in each experiment, colonies are sequenced with Sanger sequencing and HDR levels are scored

### Example 7: Modulating Pathway Choice of Cas9 Induced DSBs with 3′ Overhangs

[1641] N863A N863A Cas9 nickase induced DSBs that lead to the formation of a 3′ overhang structure are predominantly repaired using insertions, which is indicative of the ALT-NHEJ pathway (FIG. 9). The ALT-NHEJ pathway comprises of several sub-pathways referred to as blunt end joining (B-EJ), microhomology mediated end joining (MMEJ) and synthesis dependent microhomology mediated end joining (SD-MMEJ). While MMEJ and B-EJ repair outcomes are mostly deletions, insertions are a result of the SD-MMEJ pathway. DNA repair pathway choice can be altered by transiently inhibiting or down regulating components of the ALT-NHEJ pathway, such as XRCC1, Ligase I, Ligase III and Polymerase theta. Upon down regulation or transient inhibition of these ALT-NHEJ components we expect to observe increases in DNA repair by either C-NHEJ or HDR mediated pathways.

### Example 8: Down Regulation of Alt-NHEJ Factors to Enhance DNA Repair by HDR

[1642] U2OS cells were electroporated with 200 ng of each gRNA (8 and 15), 750 ng of plasmid that encodes N863A Cas9, and 30 pmols of an siRNA targeting the Pol Theta transcript as an example of inhibition of the alt-NHEJ or a control siRNA. Five days after electroporation genomic DNA was extracted. PCR amplification of the HBB locus was performed and products were subcloned into a Topo Blunt Vector. For each condition in each experiment colonies were sequenced with Sanger sequencing.

[1643] As shown in FIG. 10, down regulation of Pol theta in the context of the N863A Cas9 nuclease leads to a strong reduction of the insertion frequency and an increase in the gene conversion rate. These data suggest that the 3′ protruding ends generated by the N863A Cas9 nuclease are substrates for processing by Pol Theta, resulting in a high accumulation of insertions. Upon down-regulation of Pol Theta, the 3′ protruding DNA ends are available for engaging the gene conversion pathway (FIG. 9).

### Example 9: Modulating Pathway Choice of Cas9 Induced DSBs with 5′ Overhangs in the Presence of a Ss-ODN

[1644] The D10A Cas9 nickase induced DSBs that lead to the formation of 5′ overhangs most efficiently incorporate an exogenous ss-ODN donor template among the other Cas9 variants. The factors involved in the repair pathway through which the ss-ODN template is incorporated is incompletely characterized, but falls under the resection dependent homology-dependent (HDR) repair pathway, which includes the SSA, HR, and a potential third, alternative-HR pathway (alt-HR), for which no genetic requirements are yet identified. Factors involved in the HR pathway include Brca1, CtiP, Exo1, Brca2 and Rad51 (FIG. 11). By transiently inhibiting or down regulating factors involved in HR, an increase in SSA repair events should be observed, if HR and SSA are indeed competitive pathways. Also, a decrease in gene conversion upon down regulation or inhibition of HR factors is expected if gene conversion is in fact dependent in HR. If the ss-ODN incorporation is mediated through the SSA annealing pathway, an increase in in ss-ODN incorporation upon the transient inhibition or down regulation of HR components is expected, if HR and SSA are indeed competitive pathways.

[1645] Proteins involved in the SSA pathway include Rad52, ERCC1, XPF (SSA), and Ligase 1 (FIG. 11). By transiently inhibiting or down regulating factors involved in SSA, an increase in HR repair events is expected, if HR and SSA are indeed competitive pathways. If the ss-ODN incorporation is dependent on the SSA pathway, a decrease of donor integration upon transient inhibition or down regulation of the SSA pathway is expected. In contrast, if the donor integration is dependent on components of the HR pathway, and if SSA is indeed competing with the HR pathway, we expect to observe an increase in ss-ODN integration upon SSA pathway down regulation or inhibition.

### Example 10: Down Regulation of HR Factors to Address the Mechanism of Gene Conversion Repair

[1646] Whether gene conversion in the context of the D10A Cas9 with 2 gRNAs is dependent on the HR pathway was evaluated (FIG. 12). U2OS cell were electroporated with 200 ng of each gRNA (8 and 15), 750 ng of plasmid that encodes D10A Cas9 and 30 pmol of scrambled siRNA as a negative control or 30 pmol of siRNA against BRCA2 or Rad51—central players of canonical HR—as an example, with or without 50 pmols of a ss-ODN. Five days after electroporation genomic DNA was extracted. PCR amplification of the HBB locus was performed and products were subcloned into a Topo Blunt Vector. For each condition in each experiment colonies were sequenced with Sanger sequencing.

[1647] As shown in FIG. 12, the majority of the gene conversion events were mediated by BRCA2 and Rad51. These data are consistent with the notion that gene conversion using the HBD gene as a donor in cis is an event mediated by canonical HR. Rad51 and BRCA2 do not seams to effect the repair mediated by ss-ODN.

### Example 11: Down Regulation of SSA Factors to Address the Mechanism of Gene Correction Repair

[1648] Next, whether the gene correction in the context of the D10A with 2 gRNA was dependent on the Single Strand Annealing (SSA) pathway was evaluated(FIG. 13). Specifically, U2OS cells were electroporated with 19 pmols of S. aureus Cas9 complexes with different gRNAs directing the Cas9 protein to the ERCC1 and Rad52 locus, as an example of SSA components. A second set of cells were electroporated with S. aureus Cas9 complexed with a non-targeting control gRNAs. Samples were collected on day 4 for Western Blot to assess the level of down regulation (FIG. 13, panel B). On day 7, cells with down regulated ERCC1 or Rad52 expression and control cells were electroporated with 200 ng of gRNA8, 750 ng of plasmid that encodes D10A Cas9, with or without 50 pmols of a ss-ODN. Cells were collected 5 days after electroporation, and genomic DNA was extracted. PCR amplification of the HBB locus was performed and the resulting products were subcloned into a Topo Blunt Vector. For each condition in each experiment, colonies were sequenced with Sanger. A significant reduction in gene correction upon down regulation of the SSA pathway was observed, but not a complete elimination, suggesting that either the cells were not fully knocked down or indicative indeed of a presence of a third, alt-HR pathway.

### Example 12: Down Regulation of HR Factors to Address the Mechanism of Gene Conversion Repair

[1649] Whether gene conversion in the context of the D10A Cas9 with 2 gRNAs is dependent on the canonical HR pathway was evaluated (FIG. 11). U2OS cell were electroporated with 200 ng of each gRNA (HBB-8 and HBB-15), 750 ng of plasmid that encodes D10A Cas9 and 30 pmol of scrambled siRNA as a negative control or 30 pmol of siRNA against Exo1—a key end resection factor required for exposing ssDNA overhangs—as an example, with or without 50 pmols of a ss-ODN. Cells were collected for Western Blot analysis on day 4. Five days after electroporation genomic DNA was extracted. PCR amplification of the HBB locus was performed and products were subcloned into a Topo Blunt Vector. For each condition in each experiment colonies were sequenced with Sanger sequencing.

[1650] As shown in the left panel of FIG. 14, gene conversion was unexpectedly increased in the absence of Exo1. To confirm these unexpected results, a CRISPR/Cas9 mediated knockout approach against Exo1 was utilized. Specifically, U2OS cells were electroporated with 19 pmols of S. aureus Cas9 complexes with a gRNAs directing the Cas9 protein to the Exo1 locus. A second set of cells were electroporated with S. aureus Cas9 complexed with a non-targeting control gRNAs. Samples were collected on day 4 for Western Blot to assess the level of down regulation (FIG. 14, right panel). On day 7, cells with down regulated Exo1 expression and control cells were electroporated with 200 ng of gRNA8, 750 ng of plasmid that encodes D10A Cas9. Cells were collected 5 days after electroporation and genomic DNA was extracted. PCR amplification of the HBB locus was performed and the resulting products were subcloned into a Topo Blunt Vector. For each condition in each experiment, colonies were sequenced with Sanger. Again, an increase in gene conversion frequency upon down regulation of Exo1 with the CRISPR/Cas9 system was observed.

### Example 13: Modulating Pathway Choice of Cas9-Induced DSBs by Modulation of Epigenetic Modifiers

[1651] DSB repair is characterized by a its surrounding chromatin structure. A blunt DSB that is most frequently repaired by the C-NHEJ pathway is associated with a distinct signature of chromatin modifications that promote the pathway choice decision for a cell to undergo C-NHEJ. By modulating the factors responsible for placing or removing chromatin marks that impact on the pathway choice decision towards C-NHEJ, the repair balance should shift towards resection dependent pathways such as ALT-NHEJ or HDR. For example, proteins that affect DNA repair pathway choice include KDM4A, Setd2, HDAC1, HDAC2, and EZH2. By modulating the activity of these factors the balance of repair pathway choice should be altered.

### Example 14: HDAC1 Inhibitor Treatment

[1652] U2OS cells were electroporated with 200 ng of each gRNA (HBB-8 and HBB-15), 750 ng of plasmid that encodes wild type, D10A, or N863A Cas9, and an inhibitor against HDAC1 (Trichostatin A (TSA) or Sodium Butyrate (NaB), for example). Cells are collected 6 days after electroporation and genomic DNA is extracted. PCR amplification of the HBB locus is performed and is subcloned into a Topo Blunt Vector. For each condition in each experiment colonies are sequenced with Sanger sequencing and HDR levels are scored.

### Example 15: Table of Reagents

[1653] The below table lists siRNAs that may be useful in the described compositions and methods.

| Gene | Catalog | Item |
|---|---|---|
| BRCA2 | M-003462-01-0005 | siGENOME Human BRCA2 (675) |
| | | siRNA - SMARTpool, 5 nmol |
| Exo1 | L-013120-00-0005 | ON-TARGETplus Human EXO1 |
| | | (9156) siRNA - SMARTpool, 5 nmol |
| Rap80 | L-006995-00-0005 | ON-TARGETplus Human UIMC1- |
| | | Rap80 (51720) siRNA - |
| | | SMARTpool, 5 nmol |
| Rap80 | M-006995-03-0005 | siGENOME Human UIMC1 (51720) |
| | | siRNA - SMARTpool, 5 nmol |
| Rad51 | D-003530-05-0005 | siGENOME Human RAD51 (5888) |
| | | siRNA - Individual, 5 nmol |
| Rad51 | D-003530-07-0005 | siGENOME Human RAD51 (5888) |
| | | siRNA - Individual, 5 nmol |
| FF | CGUACGCGGAAUACUUCGAUU | FF: siRNA, Standard 0.015 μmol |
| | (SEQ ID NO: 2254) | Regular |
| PolQ | SI00090062 | Hs_POLQ_1 FlexiTube siRNA, |
| | | NM_006596, NM_199420 |

[1654] The below table lists some exemplary gRNAs for use in the described compositions and methods.

| Gene | | |
|---|---|---|
| ID | Gene name | Target |
| 10721 | POLQ_1_WS147 | GGAGTGGGAAACGGCGGCGTT |
| 10721 | POLQ_2_WS148 | GTGCCAGCCCCCAGTTCCTCT |
| 10721 | POLQ_3_WS149 | GTGTCACCGCCGCTTCCCGAGA |
| 5893 | Rad52_gRNA#3 (Exon1) | AGGATGGCTGTCACGTCCTCC |
| 5893 | Rad52_gRNA#4 (Exon1) | ACACTGAGCCGCCGCCAGCAG |
| 5893 | Rad52_gRNA#5 (Exon 1) | TGTGGTTCCTTCATGCCGGGA |
| 5893 | Rad52_gRNA#6 (Exon 1) | GCCGGGAAAGAATGAGGTGAA |
| 5893 | Rad52_gRNA#7 (Exon2) | ACATAAGTAGCCGCATGGCTG |
| 5893 | Rad52_gRNA#8 (Exon2) | CCCTGAGGCAGAGGCTGGGCC |
| 5893 | Rad52_gRNA#9 (Exon2) | CAGCCTCTGCCTCAGGGCCTT |
| 5893 | Rad52_gRNA#10 (Exon2) | TGCAGTGCCAGTACACAGCAG |
| 9156 | Exo1_gRNA#3 | AATTTGGCACCATGGGGATAC |
| 9156 | Exo1_gRNA#4 | CCTTTATACTTCCTCACATGG |
| 64421 | DCLRE1C_gRNA4 | CGAAGCGGTCTATGGAGATAG |
| 64421 | DCLRE1C_gRNA5 | TCCTGTCCCACTGCCACAAAG |
| 4361 | Mre11A_gRNA#4 | TAGTTGCAACAGATATTCATC |
| 4361 | Mre11A_gRNA#5 | TGGGCAAGTCTTAAAATTTCA |
| 4361 | Mre11A_gRNA#6 | ATCTTTCTCCATAAATCCAAG |
| 2067 | ERCC1_gRNA_1 | GGAGGGACCTCATCCTCGTCG |
| 2067 | ERCC1_gRNA_2 | GCACCCCCTCTTTGTCCTTCC |
| 2067 | ERCC1_gRNA_3 | AAGAGGGGGTGCCCCAGCCCT |
| 2067 | ERCC1_gRNA_4 | AAATTTGTGATACCCCTCGAC |
| 2067 | ERCC1_gRNA_5 | CGACGAGGATGAGGTCCCTCC |
| 5932 | RBBP8_1_WS143 | GTAAAGTCACTAGATGTATCTG |
| 5932 | RBBP8_2_WS144 | GAGGACCTTTGGACAAAACTAA |

Amino acid sequences described herein:

SEQ ID NO: 6
MKRNYILGLDIGITSVGYGIIDYETRDVIDAGVRLFKEANVENNEGRRSKRGARRLKRRRRHRIQRVKKLLFDYNLLTDHSEL
SGINPYEARVKGLSQKLSEEEFSAALLHLAKRRGVHNVNEVEEDTGNELSTKEQISRNSKALEEKYVAELQLERLKKDGEVRG
SINRFKTSDYVKEAKQLLKVQKAYHQLDQSFIDTYIDLLETRRTYYEGPGEGSPFGWKDIKEWYEMLMGHCTYFPEELRSVKY
AYNADLYNALNDLNNLVITRDENEKLEYYEKFQIIENVFKQKKKPTLKQIAKEILVNEEDIKGYRVTSTGKPEFTNLKVYHDI
KDITARKEIIENAELLDQIAKILTIYQSSEDIQEELTNLNSELTQEEIEQISNLKGYTGTHNLSLKAINLILDELWHTNDNQI
AIFNRLKLVPKKVDLSQQKEIPTTLVDDFILSPVVKRSFIQSIKVINAIIKKYGLPNDIIIELAREKNSKDAQKMINEMQKRN
RQTNERIEEIIRTTGKENAKYLIEKIKLHDMQEGKCLYSLEAIPLEDLLNNPFNYEVDHIIPRSVSFDNSFNNKVLVKQEENS
KKGNRTPFQYLSSSDSKISYETFKKHILNLAKGKGRISKTKKEYLLEERDINRFSVQKDFINRNLVDTRYATRGLMNLLRSYF
RVNNLDVKVKSINGGFTSFLRRKWKFKKERNKGYKHHAEDALIIANADFIFKEWKKLDKAKKVMENQMFEEKQAESMPEIETE
QEYKEIFITPHQIKHIKDFKDYKYSHRVDKKPNRELINDTLYSTRKDDKGNTLIVNNLNGLYDKDNDKLKKLINKSPEKLLMY
HHDPQTYQKLKLIMEQYGDEKNPLYKYYEETGNYLTKYSKKDNGPVIKKIKYYGNKLNAHLDITDDYPNSRNKVVKLSLKPYR
FDVYLDNGVYKFVTVKNLDVIKKENYYEVNSKCYEEAKKLKKISNQAEFIASFYNNDLIKINGELYRVIGVNNDLLNRIEVNM
IDITYREYLENMNDKRPPRIIKTIASKTQSIKKYSTDILGNLYEVKSKKHPQIIKKG
SEQ ID NO: 7
[sequence omitted]
SEQ ID NO: 8
MARILAFDIGISSIGWAFSENDELKDCGVRIFTKVENPKTGESLALPRRLARSARKRLARRKARLNHLKHLIANEFKLNYEDY
QSFDESLAKAYKGSLISPYELRFRALNELLSKQDFARVILHIAKRRGYDDIKNSDDKEKGAILKAIKQNEEKLANYQSVGEYL
YKEYFQKFKENSKEFTNVRNKKESYERCIAQSFLKDELKLIFKKQREFGFSFSKKFEEEVLSVAFYKRALKDFSHLVGNCSFF
TDEKRAPKNSPLAFMFVALTRIINLLNNLKNTEGILYTKDDLNALLNEVLKNGTLTYKQTKKLLGLSDDYEFKGEKGTYFIEF
KKYKEFIKALGEHNLSQDDLNEIAKDITLIKDEIKLKKALAKYDLNQNQIDSLSKLEFKDHLNISFKALKLVTPLMLEGKKYD
EACNELNLKVAINEDKKDFLPAFNETYYKDEVTNPVVLRAIKEYRKVLNALLKKYGKVHKINIELAREVGKNHSQRAKIEKEQ
NENYKAKKDAELECEKLGLKINSKNILKLRLFKEQKEFCAYSGEKIKISDLQDEKMLEIDHIYPYSRSFDDSYMNKVLVFTKQ
NQEKLNQTPFEAFGNDSAKWQKIEVLAKNLPTKKQKRILDKNYKDKEQKNFKDRNLNDTRYIARLVLNYTKDYLDFLPLSDDE
NTKLNDTQKGSKVHVEAKSGMLTSALRHTWGFSAKDRNNHLHHAIDAVIIAYANNSIVKAFSDFKKEQESNSAELYAKKISEL
DYKNKRKFFEPFSGFRQKVLDKIDEIFVSKPERKKPSGALHEETFRKEEEFYQSYGGKEGVLKALELGKIRKVNGKIVKNGDM
FRVDIFKHKKTNKFYAVPIYTMDFALKVLPNKAVARSKKGEIKDWILMDENYEFCFSLYKDSLILIQTKDMQEPEFVYYNAFT
SSTVSLIVSKHDNKFETLSKNQKILFKNANEKEVIAKSIGIQNLKVFEKYIVSALGEVTKAEFRQREDFKK
SEQ ID NO: 9
MKRILGLDLGTNSIGWALVNEAENKDERSSIVKLGVRVNPLTVDELTNFEKGKSITTNADRTLKRGMRRNLQRYKLRRETLTE
VLKEHKLITEDTILSENGNRTTFETYRLRAKAVTEEISLEEFARVLLMINKKRGYKSSRKAKGVEEGTLIDGMDIARELYNNN
LTPGELCLQLLDAGKKFLPDFYRSDLQNELDRIWEKQKEYYPEILTDVLKEELRGKKRDAVWAICAKYFVWKENYTEWNKEKG
KTEQQEREHKLEGIYSKRKRDEAKRENLQWRVNGLKEKLSLEQLVIVFQEMNTQINNSSGYLGAISDRSKELYFNKQTVGQYQ
MEMLDKNPNASLRNMVFYRQDYLDEFNMLWEKQAVYHKELTEELKKEIRDIIIFYQRRLKSQKGLIGFCEFESRQIEVDIDGK
KKIKTVGNRVISRSSPLFQEFKIWQILNNIEVIVVGKKRKRRKLKENYSALFEELNDAEQLELNGSRRLCQEEKELLAQELFI
RDKMTKSEVLKLLFDNPQELDLNFKTIDGNKTGYALFQAYSKMIEMSGHEPVDFKKPVEKVVEYIKAVFDLLNWNTDILGFNS
NEELDNQPYYKLWHLLYSFEGDNTPTGNGRLIQKMTELYGFEKEYATILANVSFQDDYGSLSAKAIHKILPHLKEGNRYDVAC
VYAGYRHSESSLTREEIANKVLKDRLMLLPKNSLHNPVVEKILNQMVNVINVIIDIYGKPDEIRVELARELKKNAKEREELTK
SIAQTTKAHEEYKTLLQTEFGLTNVSRTDILRYKLYKELESCGYKTLYSNTYISREKLFSKEFDIEHIIPQARLFDDSFSNKT
LEARSVNIEKGNKTAYDFVKEKFGESGADNSLEHYLNNIEDLFKSGKISKTKYNKLKMAEQDIPDGFIERDLRNTQYIAKKAL
SMLNEISHRVVATSGSVTDKLREDWQLIDVMKELNWEKYKALGLVEYFEDRDGRQIGRIKDWTKRNDHRHHAMDALTVAFTKD
VFIQYFNNKNASLDPNANEHAIKNKYFQNGRAIAPMPLREFRAEAKKHLENTLISIKAKNKVITGNINKTRKKGGVNKNMQQT
PRGQLHLETIYGSGKQYLTKEEKVNASFDMRKIGTVSKSAYRDALLKRLYENDNDPKKAFAGKNSLDKQPIWLDKEQMRKVPE
KVKIVTLEAIYTIRKEISPDLKVDKVIDVGVRKILIDRLNEYGNDAKKAFSNLDKNPIWLNKEKGISIKRVTISGISNAQSLH
VKKDKDGKPILDENGRNIPVDFVNTGNNHHVAVYYRPVIDKRGQLVVDEAGNPKYELEEVVVSFFEAVTRANLGLPIIDKDYK
TTEGWQFLFSMKQNEYFVFPNEKTGFNPKEIDLLDVENYGLISPNLFRVQKFSLKNYVFRHHLETTIKDTSSILRGITWIDFR
SSKGLDTIVKVRVNHIGQIVSVGEY
SEQ ID NO: 10
MSRKNYVDDYAISLDIGNASVGWSAFTPNYRLVRAKGHELIGVRLFDPADTAESRRMARTTRRRYSRRRWRLRLLDALFDQAL
SEIDPSFLARRKYSWVHPDDENNADCWYGSVLFDSNEQDKRFYEKYPTIYHLRKALMEDDSQHDIREIYLAIHHMVKYRGNFL
VEGTLESSNAFKEDELLKLLGRITRYEMSEGEQNSDIEQDDENKLVAPANGQLADALCATRGSRSMRVDNALEALSAVNDLSR
EQRAIVKAIFAGLEGNKLDLAKIFVSKEFSSENKKILGIYFNKSDYEEKCVQIVDSGLLDDEEREFLDRMQGQYNAIALKQLL
GRSTSVSDSKCASYDAHRANWNLIKLQLRTKENEKDINENYGILVGWKIDSGQRKSVRGESAYENMRKKANVFFKKMIETSDL
SETDKNRLIHDIEEDKLFPIQRDSDNGVIPHQLHQNELKQIIKKQGKYYPFLLDAFEKDGKQINKIEGLLTFRVPYFVGPLVV
PEDLQKSDNSENHWMVRKKKGEITPWNFDEMVDKDASGRKFIERLVGTDSYLLGEPTLPKNSLLYQEYEVLNELNNVRLSVRT
GNHWNDKRRMRLGREEKTLLCQRLFMKGQTVTKRTAENLLRKEYGRTYELSGLSDESKFTSSLSTYGKMCRIFGEKYVNEHRD
LMEKIVELQTVFEDKETLLHQLRQLEGISEADCALLVNTHYTGWGRLSRKLLTTKAGECKISDDFAPRKHSIIEIMRAEDRNL
MEIITDKQLGFSDWIEQENLGAENGSSLMEVVDDLRVSPKVKRGIIQSIRLIDDISKAVGKRPSRIFLELADDIQPSGRTISR
KSRLQDLYRNANLGKEFKGIADELNACSDKDLQDDRLFLYYTQLGKDMYTGEELDLDRLSSAYDIDHIIPQAVTQNDSIDNRV
LVARAENARKTDSFTYMPQIADRMRNFWQILLDNGLISRVKFERLTRQNEFSEREKERFVQRSLVETRQIMKNVATLMRQRYG
NSAAVIGLNAELTKEMHRYLGFSHKNRDINDYHHAQDALCVGIAGQFAANRGFFADGEVSDGAQNSYNQYLRDYLRGYREKLS
AEDRKQGRAFGFIVGSMRSQDEQKRVNPRTGEVVWSEEDKDYLRKVMNYRKMLVTQKVGDDFGALYDETRYAATDPKGIKGIP
FDGAKQDTSLYGGFSSAKPAYAVLIESKGKTRLVNVTMQEYSLLGDRPSDDELRKVLAKKKSEYAKANILLRHVPKMQLIRYG
GGLMVIKSAGELNNAQQLWLPYEEYCYFDDLSQGKGSLEKDDLKKLLDSILGSVQCLYPWHRFTEEELADLHVAFDKLPEDEK
KNVITGIVSALHADAKTANLSIVGMTGSWRRMNNKSGYTFSDEDEFIFQSPSGLFEKRVTVGELKRKAKKEVNSKYRTNEKRL
PTLSGASQP
SEQ ID NO: 11
METQTSNQLITSHLKDYPKQDYFVGLDIGTNSVGWAVTNTSYELLKFHSHKMWGSRLFEEGESAVTRRGFRSMRRRLERRKLR
LKLLEELFADAMAQVDSTFFIRLHESKYHYEDKTTGHSSKHILFIDEDYTDQDYFTEYPTIYHLRKDLMENGTDDIRKLFLAV
HHILKYRGNFLYEGATFNSNAFTFEDVLKQALVNITFNCFDTNSAISSISNILMESGKTKSDKAKAIERLVDTYTVFDEVNTP
DKPQKEQVKEDKKTLKAFANLVLGLSANLIDLFGSVEDIDDDLKKLQIVGDTYDEKRDELAKVWGDEIHIIDDCKSVYDAIIL
MSIKEPGLTISQSKVKAFDKHKEDLVILKSLLKLDRNVYNEMFKSDKKGLHNYVHYIKQGRTEETSCSREDFYKYTKKIVEGL
ADSKDKEYILNEIELQTLLPLQRIKDNGVIPYQLHLEELKVILDKCGPKFPFLHTVSDGFSVTEKLIKMLEFRIPYYVGPLNT
HHNIDNGGFSWAVRKQAGRVTPWNFEEKIDREKSAAAFIKNLTNKCTYLFGEDVLPKSSLLYSEFMLLNELNNVRIDGKALAQ
GVKQHLIDSIFKQDHKKMTKNRIELFLKDNNYITKKHKPEITGLDGEIKNDLTSYRDMVRILGNNFDVSMAEDIITDITIFGE
SKKMLRQTLRNKFGSQLNDETIKKLSKLRYRDWGRLSKKLLKGIDGCDKAGNGAPKTIIELMRNDSYNLMEILGDKFSFMECI
EEENAKLAQGQVVNPHDIIDELALSPAVKRAVWQALRIVDEVAHIKKALPSRIFVEVARTNKSEKKKKDSRQKRLSDLYSAIK
KDDVLQSGLQDKEFGALKSGLANYDDAALRSKKLYLYYTQMGRCAYTGNIIDLNQLNTDNYDIDHIYPRSLTKDDSFDNLVLC
ERTANAKKSDIYPIDNRIQTKQKPFWAFLKHQGLISERKYERLTRIAPLTADDLSGFIARQLVETNQSVKATTTLLRRLYPDI
DVVFVKAENVSDFRHNNNFIKVRSLNHHHHAKDAYLNIVVGNVYHEKFTRNFRLFFKKNGANRTYNLAKMFNYDVICTNAQDG
KAWDVKTSMNTVKKMMASNDVRVTRRLLEQSGALADATIYKASVAAKAKDGAYIGMKTKYSVFADVTKYGGMTKIKNAYSIIV
QYTGKKGEEIKEIVPLPIYLINRNATDIELIDYVKSVIPKAKDISIKYRKLCINQLVKVNGFYYYLGGKTNDKIYIDNAIELV
VPHDIATYIKLLDKYDLLRKENKTLKASSITTSIYNINTSTVVSLNKVGIDVFDYFMSKLRTPLYMKMKGNKVDELSSTGRSK
FIKMTLEEQSIYLLEVLNLLTNSKTTFDVKPLGITGSRSTIGVKIHNLDEFKIINESITGLYSNEVTIV
SEQ ID NO: 12
MTKLNQPYGIGLDIGSNSIGFAVVDANSHLLRLKGETAIGARLFREGQSAADRRGSRTTRRRLSRTRWRLSFLRDFFAPHITK
IDPDFFLRQKYSEISPKDKDRFKYEKRLFNDRTDAEFYEDYPSMYHLRLHLMTHTHKADPREIFLAIHHILKSRGHFLTPGAA
KDFNTDKVDLEDIFPALTEAYAQVYPDLELTFDLAKADDFKAKLLDEQATPSDTQKALVNLLLSSDGEKEIVKKRKQVLTEFA
KAITGLKTKFNLALGTEVDEADASNWQFSMGQLDDKWSNIETSMTDQGTEIFEQIQELYRARLLNGIVPAGMSLSQAKVADYG
QHKEDLELFKTYLKKLNDHELAKTIRGLYDRYINGDDAKPFLREDFVKALTKEVTAHPNEVSEQLLNRMGQANFMLKQRTKAN
GAIPIQLQQRELDQIIANQSKYYDWLAAPNPVEAHRWKMPYQLDELLNFHIPYYVGPLITPKQQAESGENVFAWMVRKDPSGN
ITPYNFDEKVDREASANTFIQRMKTTDTYLIGEDVLPKQSLLYQKYEVLNELNNVRINNECLGTDQKQRLIREVFERHSSVTI
KQVADNLVAHGDFARRPEIRGLADEKRFLSSLSTYHQLKEILHEAIDDPTKLLDIENIITWSTVFEDHTIFETKLAEIEWLDP
KKINELSGIRYRGWGQFSRKLLDGLKLGNGHTVIQELMLSNHNLMQILADETLKETMTELNQDKLKTDDIEDVINDAYTSPSN
KKALRQVLRVVEDIKHAANGQDPSWLFIETADGTGTAGKRTQSRQKQIQTVYANAAQELIDSAVRGELEDKIADKASFTDRLV
LYFMQGGRDIYTGAPLNIDQLSHYDIDHILPQSLIKDDSLDNRVLVNATINREKNNVFASTLFAGKMKATWRKWHEAGLISGR
KLRNLMLRPDEIDKFAKGFVARQLVETRQIIKLTEQIAAAQYPNTKIIAVKAGLSHQLREELDFPKNRDVNHYHHAFDAFLAA
RIGTYLLKRYPKLAPFFTYGEFAKVDVKKFREFNFIGALTHAKKNIIAKDTGEIVWDKERDIRELDRIYNFKRMLITHEVYFE
TADLFKQTIYAAKDSKERGGSKQLIPKKQGYPTQVYGGYTQESGSYNALVRVAEADTTAYQVIKISAQNASKIASANLKSREK
GKQLLNEIVVKQLAKRRKNWKPSANSFKIVIPRFGMGTLFQNAKYGLFMVNSDTYYRNYQELWLSRENQKLLKKLFSIKYEKT
QMNHDALQVYKAIIDQVEKFFKLYDINQFRAKLSDAIERFEKLPINTDGNKIGKTETLRQILIGLQANGTRSNVKNLGIKTDL
GLLQVGSGIKLDKDTQIVYQSPSGLFKRRIPLADL
SEQ ID NO: 13
MTKEYYLGLDVGTNSVGWAVTDSQYNLCKFKKKDMWGIRLFESANTAKDRRLQRGNRRRLERKKQRIDLLQEIFSPEICKIDP
TFFIRLNESRLHLEDKSNDFKYPLFIEKDYSDIEYYKEFPTIFHLRKHLIESEEKQDIRLIYLALHNIIKTRGHFLIDGDLQS
AKQLRPILDTFLLSLQEEQNLSVSLSENQKDEYEEILKNRSIAKSEKVKKLKNLFEISDELEKEEKKAQSAVIENFCKFIVGN
KGDVCKFLRVSKEELEIDSFSFSEGKYEDDIVKNLEEKVPEKVYLFEQMKAMYDWNILVDILETEEYISFAKVKQYEKHKTNL
RLLRDIILKYCTKDEYNRMFNDEKEAGSYTAYVGKLKKNNKKYWIEKKRNPEEFYKSLGKLLDKIEPLKEDLEVLTMMIEECK
NHTLLPIQKNKDNGVIPHQVHEVELKKILENAKKYYSFLTETDKDGYSVVQKIESIFRFRIPYYVGPLSTRHQEKGSNVWMVR
KPGREDRIYPWNMEEIIDFEKSNENFITRMTNKCTYLIGEDVLPKHSLLYSKYMVLNELNNVKVRGKKLPTSLKQKVFEDLFE
NKSKVTGKNLLEYLQIQDKDIQIDDLSGFDKDFKTSLKSYLDFKKQIFGEEIEKESIQNMIEDIIKWITIYGNDKEMLKRVIR
ANYSNQLTEEQMKKITGFQYSGWGNFSKMFLKGISGSDVSTGETFDIITAMWETDNNLMQILSKKFTFMDNVEDFNSGKVGKI
DKITYDSTVKEMFLSPENKRAVWQTIQVAEEIKKVMGCEPKKIFIEMARGGEKVKKRTKSRKAQLLELYAACEEDCRELIKEI
EDRDERDFNSMKLFLYYTQFGKCMYSGDDIDINELIRGNSKWDRDHIYPQSKIKDDSIDNLVLVNKTYNAKKSNELLSEDIQK
KMHSFWLSLLNKKLITKSKYDRLTRKGDFTDEELSGFIARQLVETRQSTKAIADIFKQIYSSEVVYVKSSLVSDFRKKPLNYL
KSRRVNDYHHAKDAYLNIVVGNVYNKKFTSNPIQWMKKNRDTNYSLNKVFEHDVVINGEVIWEKCTYHEDTNTYDGGTLDRIR
KIVERDNILYTEYAYCEKGELFNATIQNKNGNSTVSLKKGLDVKKYGGYFSANTSYFSLIEFEDKKGDRARHIIGVPIYIANM
LEHSPSAFLEYCEQKGYQNVRILVEKIKKNSLLIINGYPLRIRGENEVDTSFKRAIQLKLDQKNYELVRNIEKFLEKYVEKKG
NYPIDENRDHITHEKMNQLYEVLLSKMKKFNKKGMADPSDRIEKSKPKFIKLEDLIDKINVINKMLNLLRCDNDTKADLSLIE
LPKNAGSFVVKKNTIGKSKIILVNQSVTGLYENRREL
SEQ ID NO: 14
MARDYSVGLDIGTSSVGWAAIDNKYHLIRAKSKNLIGVRLFDSAVTAEKRRGYRTTRRRLSRRHWRLRLLNDIFAGPLTDFGD
ENFLARLKYSWVHPQDQSNQAHFAAGLLFDSKEQDKDFYRKYPTIYHLRLALMNDDQKHDLREVYLAIHHLVKYRGHFLIEGD
VKADSAFDVHTFADAIQRYAESNNSDENLLGKIDEKKLSAALTDKHGSKSQRAETAETAFDILDLQSKKQIQAILKSVVGNQA
NLMAIFGLDSSAISKDEQKNYKFSFDDADIDEKIADSEALLSDTEFEFLCDLKAAFDGLTLKMLLGDDKTVSAAMVRRFNEHQ
KDWEYIKSHIRNAKNAGNGLYEKSKKFDGINAAYLALQSDNEDDRKKAKKIFQDEISSADIPDDVKADFLKKIDDDQFLPIQR
TKNNGTIPHQLHRNELEQIIEKQGIYYPFLKDTYQENSHELNKITALINFRVPYYVGPLVEEEQKIADDGKNIPDPTNHWMVR
KSNDTITPWNLSQVVDLDKSGRRFIERLTGTDTYLIGEPTLPKNSLLYQKFDVLQELNNIRVSGRRLDIRAKQDAFEHLFKVQ
KTVSATNLKDFLVQAGYISEDTQIEGLADVNGKNFNNALTTYNYLVSVLGREFVENPSNEELLEEITELQTVFEDKKVLRRQL
DQLDGLSDHNREKLSRKHYTGWGRISKKLLTTKIVQNADKIDNQTFDVPRMNQSIIDTLYNTKMNLMEIINNAEDDFGVRAWI
DKQNTTDGDEQDVYSLIDELAGPKEIKRGIVQSFRILDDITKAVGYAPKRVYLEFARKTQESHLTNSRKNQLSTLLKNAGLSE
LVTQVSQYDAAALQNDRLYLYFLQQGKDMYSGEKLNLDNLSNYDIDHIIPQAYTKDNSLDNRVLVSNITNRRKSDSSNYLPAL
IDKMRPFWSVLSKQGLLSKHKFANLTRTRDFDDMEKERFIARSLVETRQIIKNVASLIDSHFGGETKAVAIRSSLTADMRRYV
DIPKNRDINDYHHAFDALLFSTVGQYTENSGLMKKGQLSDSAGNQYNRYIKEWIHAARLNAQSQRVNPFGFVVGSMRNAAPGK
LNPETGEITPEENADWSIADLDYLHKVMNFRKITVTRRLKDQKGQLYDESRYPSVLHDAKSKASINFDKHKPVDLYGGFSSAK
PAYAALIKFKNKFRLVNVLRQWTYSDKNSEDYILEQIRGKYPKAEMVLSHIPYGQLVKKDGALVTISSATELHNFEQLWLPLA
DYKLINTLLKTKEDNLVDILHNRLDLPEMTIESAFYKAFDSILSFAFNRYALHQNALVKLQAHRDDFNALNYEDKQQTLERIL
DALHASPASSDLKKINLSSGFGRLFSPSHFTLADTDEFIFQSVTGLFSTQKTVAQLYQETK
SEQ ID NO: 15
MVYDVGLDIGTGSVGWVALDENGKLARAKGKNLVGVRLFDTAQTAADRRGFRTTRRRLSRRKWRLRLLDELFSAEINEIDSSF
FQRLKYSYVHPKDEENKAHYYGGYLFPTEEETKKFHRSYPTIYHLRQELMAQPNKRFDIREIYLAIHHLVKYRGHFLSSQEKI
TIGSTYNPEDLANAIEVYADEKGLSWELNNPEQLTEIISGEAGYGLNKSMKADEALKLFEFDNNQDKVAIKTLLAGLTGNQID
FAKLFGKDISDKDEAKLWKLKLDDEALEEKSQTILSQLTDEEIELFHAVVQAYDGFVLIGLLNGADSVSAAMVQLYDQHREDR
KLLKSLAQKAGLKHKRFSEIYEQLALATDEATIKNGISTARELVEESNLSKEVKEDTLRRLDENEFLPKQRTKANSVIPHQLH
LAELQKILQNQGQYYPFLLDTFEKEDGQDNKIEELLRFRIPYYVGPLVTKKDVEHAGGDADNHWVERNEGFEKSRVTPWNFDK
VFNRDKAARDFIERLTGNDTYLIGEKTLPQNSLRYQLFTVLNELNNVRVNGKKFDSKTKADLINDLFKARKTVSLSALKDYLK
AQGKGDVTITGLADESKFNSSLSSYNDLKKTFDAEYLENEDNQETLEKIIEIQTVFEDSKIASRELSKLPLDDDQVKKLSQTH
YTGWGRLSEKLLDSKIIDERGQKVSILDKLKSTSQNFMSIINNDKYGVQAWITEQNTGSSKLTFDEKVNELTTSPANKRGIKQ
SFAVLNDIKKAMKEEPRRVYLEFAREDQTSVRSVPRYNQLKEKYQSKSLSEEAKVLKKTLDGNKNKMSDDRYFLYFQQQGKDM
YTGRPINFERLSQDYDIDHIIPQAFTKDDSLDNRVLVSRPENARKSDSFAYTDEVQKQDGSLWTSLLKSGFINRKKYERLTKA
GKYLDGQKTGFIARQLVETRQIIKNVASLIEGEYENSKAVAIRSEITADMRLLVGIKKHREINSFHHAFDALLITAAGQYMQN
RYPDRDSTNVYNEFDRYTNDYLKNLRQLSSRDEVRRLKSFGFVVGTMRKGNEDWSEENTSYLRKVMMFKNILTTKKTEKDRGP
LNKETIFSPKSGKKLIPLNSKRSDTALYGGYSNVYSAYMTLVRANGKNLLIKIPISIANQIEVGNLKINDYIVNNPAIKKFEK
ILISKLPLGQLVNEDGNLIYLASNEYRHNAKQLWLSTTDADKIASISENSSDEELLEAYDILTSENVKNRFPFFKKDIDKLSQ
VRDEFLDSDKRIAVIQTILRGLQIDAAYQAPVKIISKKVSDWHKLQQSGGIKLSDNSEMIYQSATGIFETRVKISDLL
SEQ ID NO: 16
IVDYCIGLDLGTGSVGWAVVDMNHRLMKRNGKHLWGSRLFSNAETAANRRASRSIRRRYNKRRERIRLLRAILQDMVLEKDPT
FFIRLEHTSFLDEEDKAKYLGTDYKDNYNLFIDEDFNDYTYYHKYPTIYHLRKALCESTEKADPRLIYLALHHIVKYRGNFLY
EGQKFNMDASNIEDKLSDIFTQFTSFNNIPYEDDEKKNLEILEILKKPLSKKAKVDEVMTLIAPEKDYKSAFKELVTGIAGNK
MNVTKMILCEPIKQGDSEIKLKFSDSNYDDQFSEVEKDLGEYVEFVDALHNVYSWVELQTIMGATHTDNASISEAMVSRYNKH
HDDLKLLKDCIKNNVPNKYFDMFRNDSEKSKGYYNYINRPSKAPVDEFYKYVKKCIEKVDTPEAKQILNDIELENFLLKQNSR
TNGSVPYQMQLDEMIKIIDNQAEYYPILKEKREQLLSILTFRIPYYFGPLNETSEHAWIKRLEGKENQRILPWNYQDIVDVDA
TAEGFIKRMRSYCTYFPDEEVLPKNSLIVSKYEVYNELNKIRVDDKLLEVDVKNDIYNELFMKNKTVTEKKLKNWLVNNQCCS
KDAEIKGFQKENQFSTSLTPWIDFTNIFGKIDQSNFDLIENIIYDLTVFEDKKIMKRRLKKKYALPDDKVKQILKLKYKDWSR
LSKKLLDGIVADNRFGSSVTVLDVLEMSRLNLMEIINDKDLGYAQMIEEATSCPEDGKFTYEEVERLAGSPALKRGIWQSLQI
VEEITKVMKCRPKYIYIEFERSEEAKERTESKIKKLENVYKDLDEQTKKEYKSVLEELKGFDNTKKISSDSLFLYFTQLGKCM
YSGKKLDIDSLDKYQIDHIVPQSLVKDDSFDNRVLVVPSENQRKLDDLVVPFDIRDKMYRFWKLLFDHELISPKKFYSLIKTE
YTERDEERFINRQLVETRQITKNVTQIIEDHYSTTKVAAIRANLSHEFRVKNHIYKNRDINDYHHAHDAYIVALIGGFMRDRY
PNMHDSKAVYSEYMKMFRKNKNDQKRWKDGFVINSMNYPYEVDGKLIWNPDLINEIKKCFYYKDCYCTTKLDQKSGQLFNLTV
LSNDAHADKGVTKAVVPVNKNRSDVHKYGGFSGLQYTIVAIEGQKKKGKKTELVKKISGVPLHLKAASINEKINYIEEKEGLS
DVRIIKDNIPVNQMIEMDGGEYLLTSPTEYVNARQLVLNEKQCALIADIYNAIYKQDYDNLDDILMIQLYIELTNKMKVLYPA
YRGIAEKFESMNENYVVISKEEKANIIKQMLIVMHRGPQNGNIVYDDFKISDRIGRLKTKNHNLNNIVFISQSPTGIYTKKYK
L
SEQ ID NO: 17
MKSEKKYYIGLDVGTNSVGWAVTDEFYNILRAKGKDLWGVRLFEKADTAANTRIFRSGRRRNDRKGMRLQILREIFEDEIKKV
DKDFYDRLDESKFWAEDKKVSGKYSLFNDKNFSDKQYFEKFPTIFHLRKYLMEEHGKVDIRYYFLAINQMMKRRGHFLIDGQI
SHVTDDKPLKEQLILLINDLLKIELEEELMDSIFEILADVNEKRTDKKNNLKELIKGQDFNKQEGNILNSIFESIVTGKAKIK
NIISDEDILEKIKEDNKEDFVLTGDSYEENLQYFEEVLQENITLFNTLKSTYDFLILQSILKGKSTLSDAQVERYDEHKKDLE
ILKKVIKKYDEDGKLFKQVFKEDNGNGYVSYIGYYLNKNKKITAKKKISNIEFTKYVKGILEKQCDCEDEDVKYLLGKIEQEN
FLLKQISSINSVIPHQIHLFELDKILENLAKNYPSFNNKKEEFTKIEKIRKTFTFRIPYYVGPLNDYHKNNGGNAWIFRNKGE
KIRPWNFEKIVDLHKSEEEFIKRMLNQCTYLPEETVLPKSSILYSEYMVLNELNNLRINGKPLDTDVKLKLIEELFKKKTKVT
LKSIRDYMVRNNFADKEDFDNSEKNLEIASNMKSYIDFNNILEDKFDVEMVEDLIEKITIHTGNKKLLKKYIEETYPDLSSSQ
IQKIINLKYKDWGRLSRKLLDGIKGTKKETEKTDTVINFLRNSSDNLMQIIGSQNYSFNEYIDKLRKKYIPQEISYEVVENLY
VSPSVKKMIWQVIRVTEEITKVMGYDPDKIFIEMAKSEEEKKTTISRKNKLLDLYKAIKKDERDSQYEKLLTGLNKLDDSDLR
SRKLYLYYTQMGRDMYTGEKIDLDKLFDSTHYDKDHIIPQSMKKDDSIINNLVLVNKNANQTTKGNIYPVPSSIRNNPKIYNY
WKYLMEKEFISKEKYNRLIRNTPLTNEELGGFINRQLVETRQSTKAIKELFEKFYQKSKIIPVKASLASDLRKDMNTLKSREV
NDLHHAHDAFLNIVAGDVWNREFTSNPINYVKENREGDKVKYSLSKDFTRPRKSKGKVIWTPEKGRKLIVDTLNKPSVLISNE
SHVKKGELFNATIAGKKDYKKGKIYLPLKKDDRLQDVSKYGGYKAINGAFFFLVEHTKSKKRIRSIELFPLHLLSKFYEDKNT
VLDYAINVLQLQDPKIIIDKINYRTEIIIDNFSYLISTKSNDGSITVKPNEQMYWRVDEISNLKKIENKYKKDAILTEEDRKI
MESYIDKIYQQFKAGKYKNRRTTDTIIEKYEIIDLDTLDNKQLYQLLVAFISLSYKTSNNAVDFTVIGLGTECGKPRITNLPD
NTYLVYKSITGIYEKRIRIK
SEQ ID NO: 18
MKLRGIEDDYSIGLDMGTSSVGWAVTDERGTLAHFKRKPTWGSRLFREAQTAAVARMPRGQRRRYVRRRWRLDLLQKLFEQQM
EQADPDFFIRLRQSRLLRDDRAEEHADYRWPLFNDCKFTERDYYQRFPTIYHVRSWLMETDEQADIRLIYLALHNIVKHRGNF
LREGQSLSAKSARPDEALNHLRETLRVWSSERGFECSIADNGSILAMLTHPDLSPSDRRKKIAPLFDVKSDDAAADKKLGIAL
AGAVIGLKTEFKNIFGDFPCEDSSIYLSNDEAVDAVRSACPDDCAELFDRLCEVYSAYVLQGLLSYAPGQTISANMVEKYRRY
GEDLALLKKLVKIYAPDQYRMFFSGATYPGTGIYDAAQARGYTKYNLGPKKSEYKPSESMQYDDFRKAVEKLFAKTDARADER
YRMMMDRFDKQQFLRRLKTSDNGSIYHQLHLEELKAIVENQGRFYPFLKRDADKLVSLVSFRIPYYVGPLSTRNARTDQHGEN
RFAWSERKPGMQDEPIFPWNWESIIDRSKSAEKFILRMTGMCTYLQQEPVLPKSSLLYEEFCVLNELNGAHWSIDGDDEHRFD
AADREGIIEELFRRKRTVSYGDVAGWMERERNQIGAHVCGGQGEKGFESKLGSYIFFCKDVFKVERLEQSDYPMIERIILWNT
LFEDRKILSQRLKEEYGSRLSAEQIKTICKKRFTGWGRLSEKFLTGITVQVDEDSVSIMDVLREGCPVSGKRGRAMVMMEILR
DEELGFQKKVDDFNRAFFAENAQALGVNELPGSPAVRRSLNQSIRIVDEIASIAGKAPANIFIEVTRDEDPKKKGRRTKRRYN
DLKDALEAFKKEDPELWRELCETAPNDMDERLSLYFMQRGKCLYSGRAIDIHQLSNAGIYEVDHIIPRTYVKDDSLENKALVY
REENQRKTDMLLIDPEIRRRMSGYWRMLHEAKLIGDKKFRNLLRSRIDDKALKGFIARQLVETGQMVKLVRSLLEARYPETNI
ISVKASISHDLRTAAELVKCREANDFHHAHDAFLACRVGLFIQKRHPCVYENPIGLSQVVRNYVRQQADIFKRCRTIPGSSGF
IVNSFMTSGFDKETGEIFKDDWDAEAEVEGIRRSLNFRQCFISRMPFEDHGVFWDATIYSPRAKKTAALPLKQGLNPSRYGSF
SREQFAYFFIYKARNPRKEQTLFEFAQVPVRLSAQIRQDENALERYARELAKDQGLEFIRIERSKILKNQLIEIDGDRLCITG
KEEVRNACELAFAQDEMRVIRMLVSEKPVSRECVISLFNRILLHGDQASRRLSKQLKLALLSEAFSEASDNVQRNVVLGLIAI
FNGSTNMVNLSDIGGSKFAGNVRIKYKKELASPKVNVHLIDQSVTGMFERRTKIGL
SEQ ID NO: 19
MENKQYYIGLDVGTNSVGWAVTDTSYNLLRAKGKDMWGARLFEKANTAAERRTKRTSRRRSEREKARKAMLKELFADEINRVD
PSFFIRLEESKFFLDDRSENNRQRYTLFNDATFTDKDYYEKYKTIFHLRSALINSDEKFDVRLVFLAILNLFSHRGHFLNASL
KGDGDIQGMDVFYNDLVESCEYFEIELPRITNIDNFEKILSQKGKSRTKILEELSEELSISKKDKSKYNLIKLISGLEASVVE
LYNIEDIQDENKKIKIGFRESDYEESSLKVKEIIGDEYFDLVERAKSVHDMGLLSNIIGNSKYLCEARVEAYENHHKDLLKIK
ELLKKYDKKAYNDMFRKMTDKNYSAYVGSVNSNIAKERRSVDKRKIEDLYKYIEDTALKNIPDDNKDKIEILEKIKLGEFLKK
QLTASNGVIPNQLQSRELRAILKKAENYLPFLKEKGEKNLTVSEMIIQLFEFQIPYYVGPLDKNPKKDNKANSWAKIKQGGRI
LPWNFEDKVDVKGSRKEFIEKMVRKCTYISDEHTLPKQSLLYEKFMVLNEINNIKIDGEKISVEAKQKIYNDLFVKGKKVSQK
DIKKELISLNIMDKDSVLSGTDTVCNAYLSSIGKFTGVFKEEINKQSIVDMIEDIIFLKTVYGDEKRFVKEEIVEKYGDEIDK
DKIKRILGFKFSNWGNLSKSFLELEGADVGTGEVRSIIQSLWETNFNLMELLSSRFTYMDELEKRVKKLEKPLSEWTIEDLDD
MYLSSPVKRMIWQSMKIVDEIQTVIGYAPKRIFVEMTRSEGEKVRTKSRKDRLKELYNGIKEDSKQWVKELDSKDESYFRSKK
MYLYYLQKGRCMYSGEVIELDKLMDDNLYDIDHIYPRSFVKDDSLDNLVLVKKEINNRKQNDPITPQIQASCQGFWKILHDQG
FMSNEKYSRLTRKTQEFSDEEKLSFINRQIVETGQATKCMAQILQKSMGEDVDVVFSKARLVSEFRHKFELFKSRLINDFHHA
NDAYLNIVVGNSYFVKFTRNPANFIKDARKNPDNPVYKYHMDRFFERDVKSKSEVAWIGQSEGNSGTIVIVKKTMAKNSPLIT
KKVEEGHGSITKETIVGVKEIKFGRNKVEKADKTPKKPNLQAYRPIKTSDERLCNILRYGGRTSISISGYCLVEYVKKRKTIR
SLEAIPVYLGRKDSLSEEKLLNYFRYNLNDGGKDSVSDIRLCLPFISTNSLVKIDGYLYYLGGKNDDRIQLYNAYQLKMKKEE
VEYIRKIEKAVSMSKFDEIDREKNPVLTEEKNIELYNKIQDKFENTVFSKRMSLVKYNKKDLSFGDFLKNKKSKFEEIDLEKQ
CKVLYNIIFNLSNLKEVDLSDIGGSKSTGKCRCKKNITNYKEFKLIQQSITGLYSCEKDLMTI
SEQ ID NO: 20
MKNLKEYYIGLDIGTASVGWAVTDESYNIPKFNGKKMWGVRLFDDAKTAEERRTQRGSRRRLNRRKERINLLQDLFATEISKV
DPNFFLRLDNSDLYREDKDEKLKSKYTLFNDKDFKDRDYHKKYPTIHHLIMDLIEDEGKKDIRLLYLACHYLLKNRGHFIFEG
QKFDTKNSFDKSINDLKIHLRDEYNIDLEFNNEDLIEIITDTTLNKTNKKKELKNIVGDTKFLKAISAIMIGSSQKLVDLFED
GEFEETTVKSVDFSTTAFDDKYSEYEEALGDTISLLNILKSIYDSSILENLLKDADKSKDGNKYISKAFVKKFNKHGKDLKTL
KRIIKKYLPSEYANIFRNKSINDNYVAYTKSNITSNKRTKASKFTKQEDFYKFIKKHLDTIKETKLNSSENEDLKLIDEMLTD
IEFKTFIPKLKSSDNGVIPYQLKLMELKKILDNQSKYYDFLNESDEYGTVKDKVESIMEFRIPYYVGPLNPDSKYAWIKRENT
KITPWNFKDIVDLDSSREEFIDRLIGRCTYLKEEKVLPKASLIYNEFMVLNELNNLKLNEFLITEEMKKAIFEELFKTKKKVT
LKAVSNLLKKEFNLTGDILLSGTDGDFKQGLNSYIDFKNIIGDKVDRDDYRIKIEEIIKLIVLYEDDKTYLKKKIKSAYKNDF
TDDEIKKIAALNYKDWGRLSKRFLTGIEGVDKTTGEKGSIIYFMREYNLNLMELMSGHYTFTEEVEKLNPVENRELCYEMVDE
LYLSPSVKRMLWQSLRVVDEIKRIIGKDPKKIFIEMARAKEAKNSRKESRKNKLLEFYKFGKKAFINEIGEERYNYLLNEINS
EEESKFRWDNLYLYYTQLGRCMYSLEPIDLADLKSNNIYDQDHIYPKSKIYDDSLENRVLVKKNLNHEKGNQYPIPEKVLNKN
AYGFWKILFDKGLIGQKKYTRLTRRTPFEERELAEFIERQIVETRQATKETANLLKNICQDSEIVYSKAENASRFRQEFDIIK
CRTVNDLHHMHDAYLNIVVGNVYNTKFTKNPLNFIKDKDNVRSYNLENMFKYDVVRGSYTAWIADDSEGNVKAATIKKVKREL
EGKNYRFTRMSYIGTGGLYDQNLMRKGKGQIPQKENTNKSNIEKYGGYNKASSAYFALIESDGKAGRERTLETIPIMVYNQEK
YGNTEAVDKYLKDNLELQDPKILKDKIKINSLIKLDGFLYNIKGKTGDSLSIAGSVQLIVNKEEQKLIKKMDKFLVKKKDNKD
IKVTSFDNIKEEELIKLYKTLSDKLNNGIYSNKRNNQAKNISEALDKFKEISIEEKIDVLNQIILLFQSYNNGCNLKSIGLSA
KTGVVFIPKKLNYKECKLINQSITGLFENEVDLLNL
SEQ ID NO: 21
MGKMYYLGLDIGTNSVGYAVTDPSYHLLKFKGEPMWGAHVFAAGNQSAERRSFRTSRRRLDRRQQRVKLVQEIFAPVISPIDP
RFFIRLHESALWRDDVAETDKHIFFNDPTYTDKEYYSDYPTIHHLIVDLMESSEKHDPRLVYLAVAWLVAHRGHFLNEVDKDN
IGDVLSFDAFYPEFLAFLSDNGVSPWVCESKALQATLLSRNSVNDKYKALKSLIFGSQKPEDNFDANISEDGLIQLLAGKKVK
VNKLFPQESNDASFTLNDKEDAIEEILGTLTPDECEWIAHIRRLFDWAIMKHALKDGRTISESKVKLYEQHHHDLTQLKYFVK
TYLAKEYDDIFRNVDSETTKNYVAYSYHVKEVKGTLPKNKATQEEFCKYVLGKVKNIECSEADKVDFDEMIQRLTDNSFMPKQ
VSGENRVIPYQLYYYELKTILNKAASYLPFLTQCGKDAISNQDKLLSIMTFRIPYFVGPLRKDNSEHAWLERKAGKIYPWNFN
DKVDLDKSEEAFIRRMTNTCTYYPGEDVLPLDSLIYEKFMILNEINNIRIDGYPISVDVKQQVFGLFEKKRRVTVKDIQNLLL
SLGALDKHGKLTGIDTTIHSNYNTYHHFKSLMERGVLTRDDVERIVERMTYSDDTKRVRLWLNNNYGTLTADDVKHISRLRKH
DFGRLSKMFLTGLKGVHKETGERASILDFMWNTNDNLMQLLSECYTFSDEITKLQEAYYAKAQLSLNDFLDSMYISNAVKRPI
YRTLAVVNDIRKACGTAPKRIFIEMARDGESKKKRSVTRREQIKNLYRSIRKDFQQEVDFLEKILENKSDGQLQSDALYLYFA
QLGRDMYTGDPIKLEHIKDQSFYNIDHIYPQSMVKDDSLDNKVLVQSEINGEKSSRYPLDAAIRNKMKPLWDAYYNHGLISLK
KYQRLTRSTPFTDDEKWDFINRQLVETRQSTKALAILLKRKFPDTEIVYSKAGLSSDFRHEFGLVKSRNINDLHHAKDAFLAI
VTGNVYHERFNRRWFMVNQPYSVKTKTLFTHSIKNGNFVAWNGEEDLGRIVKMLKQNKNTIHFTRFSFDRKEGLFDIQPLKAS
TGLVPRKAGLDVVKYGGYDKSTAAYYLLVRFTLEDKKTQHKLMMIPVEGLYKARIDHDKEFLTDYAQTTISEILQKDKQKVIN
IMFPMGTRHIKLNSMISIDGFYLSIGGKSSKGKSVLCHAMVPLIVPHKIECYIKAMESFARKFKENNKLRIVEKFDKITVEDN
LNLYELFLQKLQHNPYNKFFSTQFDVLTNGRSTFTKLSPEEQVQTLLNILSIFKTCRSSGCDLKSINGSAQAARIMISADLTG
LSKKYSDIRLVEQSASGLFVSKSQNLLEYL
SEQ ID NO: 22
MTKKEQPYNIGLDIGTSSVGWAVTNDNYDLLNIKKKNLWGVRLFEEAQTAKETRLNRSTRRRYRRRKNRINWLNEIFSEELAK
TDPSFLIRLQNSWVSKKDPDRKRDKYNLFIDGPYTDKEYYREFPTIFHLRKELILNKDKADIRLIYLALHNILKYRGNFTYEH
QKFNISNLNNNLSKELIELNQQLIKYDISFPDDCDWNHISDILIGRGNATQKSSNILKDFTLDKETKKLLKEVINLILGNVAH
LNTIFKTSLTKDEEKLNFSGKDIESKLDDLDSILDDDQFTVLDAANRIYSTITLNEILNGESYFSMAKVNQYENHAIDLCKLR
DMWHTTKNEEAVEQSRQAYDDYINKPKYGTKELYTSLKKFLKVALPTNLAKEAEEKISKGTYLVKPRNSENGVVPYQLNKIEM
EKIIDNQSQYYPFLKENKEKLLSILSFRIPYYVGPLQSAEKNPFAWMERKSNGHARPWNFDEIVDREKSSNKFIRRMTVTDSY
LVGEPVLPKNSLIYQRYEVLNELNNIRITENLKTNPIGSRLTVETKQRIYNELFKKYKKVTVKKLTKWLIAQGYYKNPILIGL
SQKDEFNSTLTTYLDMKKIFGSSFMEDNKNYDQIEELIEWLTIFEDKQILNEKLHSSKYSYTPDQIKKISNMRYKGWGRLSKK
ILMDITTETNTPQLLQLSNYSILDLMWATNNNFISIMSNDKYDFKNYIENHNLNKNEDQNISDLVNDIHVSPALKRGITQSIK
IVQEIVKFMGHAPKHIFIEVTRETKKSEITTSREKRIKRLQSKLLNKANDFKPQLREYLVPNKKIQEELKKHKNDLSSERIML
YFLQNGKSLYSEESLNINKLSDYQVDHILPRTYIPDDSLENKALVLAKENQRKADDLLLNSNVIDRNLERWTYMLNNNMIGLK
KFKNLTRRVITDKDKLGFIHRQLVQTSQMVKGVANILDNMYKNQGTTCIQARANLSTAFRKALSGQDDTYHFKHPELVKNRNV
NDFHHAQDAYLASFLGTYRLRRFPTNEMLLMNGEYNKFYGQVKELYSKKKKLPDSRKNGFIISPLVNGTTQYDRNTGEIIWNV
GFRDKILKIFNYHQCNVTRKTEIKTGQFYDQTIYSPKNPKYKKLIAQKKDMDPNIYGGFSGDNKSSITIVKIDNNKIKPVAIP
IRLINDLKDKKTLQNWLEENVKHKKSIQIIKNNVPIGQIIYSKKVGLLSLNSDREVANRQQLILPPEHSALLRLLQIPDEDLD
QILAFYDKNILVEILQELITKMKKFYPFYKGEREFLIANIENFNQATTSEKVNSLEELITLLHANSTSAHLIFNNIEKKAFGR
KTHGLTLNNTDFIYQSVTGLYETRIHIE
SEQ ID NO: 23
MTKFNKNYSIGLDIGVSSVGYAVVTEDYRVPAFKFKVLGNTEKEKIKKNLIGSTTFVSAQPAKGTRVFRVNRRRIDRRNHRIT
YLRDIFQKEIEKVDKNFYRRLDESFRVLGDKSEDLQIKQPFFGDKELETAYHKKYPTIYHLRKHLADADKNSPVADIREVYMA
ISHILKYRGHFLTLDKINPNNINMQNSWIDFIESCQEVFDLEISDESKNIADIFKSSENRQEKVKKILPYFQQELLKKDKSIF
KQLLQLLFGLKTKFKDCFELEEEPDLNFSKENYDENLENFLGSLEEDFSDVFAKLKVLRDTILLSGMLTYTGATHARFSATMV
ERYEEHRKDLQRFKFFIKQNLSEQDYLDIFGRKTQNGFDVDKETKGYVGYITNKMVLTNPQKQKTIQQNFYDYISGKITGIEG
AEYFLNKISDGTFLRKLRTSDNGAIPNQIHAYELEKIIERQGKDYPFLLENKDKLLSILTFKIPYYVGPLAKGSNSRFAWIKR
ATSSDILDDNDEDTRNGKIRPWNYQKLINMDETRDAFITNLIGNDIILLNEKVLPKRSLIYEEVMLQNELTRVKYKDKYGKAH
FFDSELRQNIINGLFKNNSKRVNAKSLIKYLSDNHKDLNAIEIVSGVEKGKSFNSTLKTYNDLKTIFSEELLDSEIYQKELEE
IIKVITVFDDKKSIKNYLTKFFGHLEILDEEKINQLSKLRYSGWGRYSAKLLLDIRDEDTGFNLLQFLRNDEENRNLTKLISD
NTLSFEPKIKDIQSKSTIEDDIFDEIKKLAGSPAIKRGILNSIKIVDELVQIIGYPPHNIVIEMARENMTTEEGQKKAKTRKT
KLESALKNIENSLLENGKVPHSDEQLQSEKLYLYYLQNGKDMYTLDKTGSPAPLYLDQLDQYEVDHIIPYSFLPIDSIDNKVL
THRENNQQKLNNIPDKETVANMKPFWEKLYNAKLISQTKYQRLTTSERTPDGVLTESMKAGFIERQLVETRQIIKHVARILDN
RFSDTKIITLKSQLITNFRNTFHIAKIRELNDYHHAHDAYLAVVVGQTLLKVYPKLAPELIYGHHAHFNRHEENKATLRKHLY
SNIMRFFNNPDSKVSKDIWDCNRDLPIIKDVIYNSQINFVKRTMIKKGAFYNQNPVGKFNKQLAANNRYPLKTKALCLDTSIY
GGYGPMNSALSIIIIAERFNEKKGKIETVKEFHDIFIIDYEKFNNNPFQFLNDTSENGFLKKNNINRVLGFYRIPKYSLMQKI
DGTRMLFESKSNLHKATQFKLTKTQNELFFHMKRLLTKSNLMDLKSKSAIKESQNFILKHKEEFDNISNQLSAFSQKMLGNTT
SLKNLIKGYNERKIKEIDIRDETIKYFYDNFIKMFSFVKSGAPKDINDFFDNKCTVARMRPKPDKKLLNATLIHQSITGLYET
RIDLSKLGED
SEQ ID NO: 24
MKQEYFLGLDMGTGSLGWAVTDSTYQVMRKHGKALWGTRLFESASTAEERRMFRTARRRLDRRNWRIQVLQEIFSEEISKVDP
GFFLRMKESKYYPEDKRDAEGNCPELPYALFVDDNYTDKNYHKDYPTIYHLRKMLMETTEIPDIRLVYLVLHHMMKHRGHFLL
SGDISQIKEFKSTFEQLIQNIQDEELEWHISLDDAAIQFVEHVLKDRNLTRSTKKSRLIKQLNAKSACEKAILNLLSGGTVKL
SDIFNNKELDESERPKVSFADSGYDDYIGIVEAELAEQYYIIASAKAVYDWSVLVEILGNSVSISEAKIKVYQKHQADLKTLK
KIVRQYMTKEDYKRVFVDTEEKLNNYSAYIGMTKKNGKKVDLKSKQCTQADFYDFLKKNVIKVIDHKEITQEIESEIEKENFL
PKQVTKDNGVIPYQVHDYELKKILDNLGTRMPFIKENAEKIQQLFEFRIPYYVGPLNRVDDGKDGKFTWSVRKSDARIYPWNF
TEVIDVEASAEKFIRRMTNKCTYLVGEDVLPKDSLVYSKFMVLNELNNLRLNGEKISVELKQRIYEELFCKYRKVTRKKLERY
LVIEGIAKKGVEITGIDGDFKASLTAYHDFKERLTDVQLSQRAKEAIVLNVVLFGDDKKLLKQRLSKMYPNLTTGQLKGICSL
SYQGWGRLSKTFLEEITVPAPGTGEVWNIMTALWQTNDNLMQLLSRNYGFTNEVEEFNTLKKETDLSYKTVDELYVSPAVKRQ
IWQTLKVVKEIQKVMGNAPKRVFVEMAREKQEGKRSDSRKKQLVELYRACKNEERDWITELNAQSDQQLRSDKLFLYYIQKGR
CMYSGETIQLDELWDNTKYDIDHIYPQSKTMDDSLNNRVLVKKNYNAIKSDTYPLSLDIQKKMMSFWKMLQQQGFITKEKYVR
LVRSDELSADELAGFIERQIVETRQSTKAVATILKEALPDTEIVYVKAGNVSNFRQTYELLKVREMNDLHHAKDAYLNIVVGN
AYFVKFTKNAAWFIRNNPGRSYNLKRMFEFDIERSGEIAWKAGNKGSIVTVKKVMQKNNILVTRKAYEVKGGLFDQQIMKKGK
GQVPIKGNDERLADIEKYGGYNKAAGTYFMLVKSLDKKGKEIRTIEFVPLYLKNQIEINHESAIQYLAQERGLNSPEILLSKI
KIDTLFKVDGFKMWLSGRTGNQLIFKGANQLILSHQEAAILKGVVKYVNRKNENKDAKLSERDGMTEEKLLQLYDTFLDKLSN
TVYSIRLSAQIKTLTEKRAKFIGLSNEDQCIVLNEILHMFQCQSGSANLKLIGGPGSAGILVMNNNITACKQISVINQSPTGI
YEKEIDLIKL
SEQ ID NO: 25
MKKPYSIGLDIGTNSVGWAVVTDDYKVPAKKMKVLGNTDKSHIEKNLLGALLFDSGNTAEDRRLKRTARRRYTRRRNRILYLQ
EIFSEEMGKVDDSFFHRLEDSFLVTEDKRGERHPIFGNLEEEVKYHENFPTIYHLRQYLADNPEKVDLRLVYLALAHIIKFRG
HFLIEGKFDTRNNDVQRLFQEFLAVYDNTFENSSLQEQNVQVEEILTDKISKSAKKDRVLKLFPNEKSNGRFAEFLKLIVGNQ
ADFKKHFELEEKAPLQFSKDTYEEELEVLLAQIGDNYAELFLSAKKLYDSILLSGILTVTDVGTKAPLSASMIQRYNEHQMDL
AQLKQFIRQKLSDKYNEVFSDVSKDGYAGYIDGKTNQEAFYKYLKGLLNKIEGSGYFLDKIEREDFLRKQRTFDNGSIPHQIH
LQEMRAIIRRQAEFYPFLADNQDRIEKLLTFRIPYYVGPLARGKSDFAWLSRKSADKITPWNFDEIVDKESSAEAFINRMTNY
DLYLPNQKVLPKHSLLYEKFTVYNELTKVKYKTEQGKTAFFDANMKQEIFDGVFKVYRKVTKDKLMDFLEKEFDEFRIVDLTG
LDKENKVFNASYGTYHDLCKILDKDFLDNSKNEKILEDIVLTLTLFEDREMIRKRLENYSDLLTKEQVKKLERRHYTGWGRLS
AELIHGIRNKESRKTILDYLIDDGNSNRNFMQLINDDALSFKEEIAKAQVIGETDNLNQVVSDIAGSPAIKKGILQSLKIVDE
LVKIMGHQPENIVVEMARENQFTNQGRRNSQQRLKGLTDSIKEFGSQILKEHPVENSQLQNDRLFLYYLQNGRDMYTGEELDI
DYLSQYDIDHIIPQAFIKDNSIDNRVLTSSKENRGKSDDVPSKDVVRKMKSYWSKLLSAKLITQRKFDNLTKAERGGLTDDDK
AGFIKRQLVETRQITKHVARILDERFNTETDENNKKIRQVKIVTLKSNLVSNFRKEFELYKVREINDYHHAHDAYLNAVIGKA
LLGVYPQLEPEFVYGDYPHFHGHKENKATAKKFFYSNIMNFFKKDDVRTDKNGEIIWKKDEHISNIKKVLSYPQVNIVKKVEE
QTGGFSKESILPKGNSDKLIPRKTKKFYWDTKKYGGFDSPIVAYSILVIADIEKGKSKKLKTVKALVGVTIMEKMTFERDPVA
FLERKGYRNVQEENIIKLPKYSLFKLENGRKRLLASARELQKGNEIVLPNHLGTLLYHAKNIHKVDEPKHLDYVDKHKDEFKE
LLDVVSNFSKKYTLAEGNLEKIKELYAQNNGEDLKELASSFINLLTFTAIGAPATFKFFDKNIDRKRYTSTTEILNATLIHQS
ITGLYETRIDLNKLGGD
SEQ ID NO: 26
[sequence omitted]
SEQ ID NO: 27
MTKPYSIGLDIGTNSVGWAVTTDNYKVPSKKMKVLGNTSKKYIKKNLLGVLLFDSGITAEGRRLKRTARRRYTRRRNRILYLQ
EIFSTEMATLDDAFFQRLDDSFLVPDDKRDSKYPIFGNLVEEKAYHDEFPTIYHLRKYLADSTKKADLRLVYLALAHMIKYRG
HFLIEGEFNSKNNDIQKNFQDFLDTYNAIFESDLSLENSKQLEEIVKDKISKLEKKDRILKLFPGEKNSGIFSEFLKLIVGNQ
ADFRKCFNLDEKASLHFSKESYDEDLETLLGYIGDDYSDVFLKAKKLYDAILLSGFLTVTDNETEAPLSSAMIKRYNEHKEDL
ALLKEYIRNISLKTYNEVFKDDTKNGYAGYIDGKTNQEDFYVYLKKLLAEFEGADYFLEKIDREDFLRKQRTFDNGSIPYQIH
LQEMRAILDKQAKFYPFLAKNKERIEKILTFRIPYYVGPLARGNSDFAWSIRKRNEKITPWNFEDVIDKESSAEAFINRMTSF
DLYLPEEKVLPKHSLLYETFNVYNELTKVRFIAESMRDYQFLDSKQKKDIVRLYFKDKRKVTDKDIIEYLHAIYGYDGIELKG
IEKQFNSSLSTYHDLLNIINDKEFLDDSSNEAIIEEIIHTLTIFEDREMIKQRLSKFENIFDKSVLKKLSRRHYTGWGKLSAK
LINGIRDEKSGNTILDYLIDDGISNRNFMQLIHDDALSFKKKIQKAQIIGDEDKGNIKEVVKSLPGSPAIKKGILQSIKIVDE
LVKVMGGRKPESIVVEMARENQYTNQGKSNSQQRLKRLEKSLKELGSKILKENIPAKLSKIDNNALQNDRLYLYYLQNGKDMY
TGDDLDIDRLSNYDIDHIIPQAFLKDNSIDNKVLVSSASNRGKSDDVPSLEVVKKRKTFWYQLLKSKLISQRKFDNLTKAERG
GLSPEDKAGFIQRQLVETRQITKHVARLLDEKFNNKKDENNRAVRTVKIITLKSTLVSQFRKDFELYKVREINDFHHAHDAYL
NAVVASALLKKYPKLEPEFVYGDYPKYNSFRERKSATEKVYFYSNIMNIFKKSISLADGRVIERPLIEVNEETGESVWNKESD
LATVRRVLSYPQVNVVKKVEEQNHGLDRGKPKGLFNANLSSKPKPNSNENLVGAKEYLDPKKYGGYAGISNSFTVLVKGTIEK
GAKKKITNVLEFQGISILDRINYRKDKLNFLLEKGYKDIELIIELPKYSLFELSDGSRRMLASILSTNNKRGEIHKGNQIFLS
QKFVKLLYHAKRISNTINENHRKYVENHKKEFEELFYYILEFNENYVGAKKNGKLLNSAFQSWQNHSIDELCSSFIGPTGSER
KGLFELTSRGSAADFEFLGVKIPRYRDYTPSSLLKDATLIHQSVTGLYETRIDLAKLGEG
SEQ ID NO: 28
MKKQKFSDYYLGFDIGTNSVGWCVTDLDYNVLRFNKKDMWGSRLFDEAKTAAERRVQRNSRRRLKRRKWRLNLLEEIFSDEIM
KIDSNFFRRLKESSLWLEDKNSKEKFTLFNDDNYKDYDFYKQYPTIFHLRDELIKNPEKKDIRLIYLALHSIFKSRGHFLFEG
QNLKEIKNFETLYNNLISFLEDNGINKSIDKDNIEKLEKIICDSGKGLKDKEKEFKGIFNSDKQLVAIFKLSVGSSVSLNDLF
DTDEYKKEEVEKEKISFREQIYEDDKPIYYSILGEKIELLDIAKSFYDFMVLNNILSDSNYISEAKVKLYEEHKKDLKNLKYI
IRKYNKENYDKLFKDKNENNYPAYIGLNKEKDKKEVVEKSRLKIDDLIKVIKGYLPKPERIEEKDKTIFNEILNKIELKTILP
KQRISDNGTLPYQIHEVELEKILENQSKYYDFLNYEENGVSTKDKLLKTFKFRIPYYVGPLNSYHKDKGGNSWIVRKEEGKIL
PWNFEQKVDIEKSAEEFIKRMTNKCTYLNGEDVIPKDSFLYSEYIILNELNKVQVNDEFLNEENKRKIIDELFKENKKVSEKK
FKEYLLVNQIANRTVELKGIKDSFNSNYVSYIKFKDIFGEKLNLDIYKEISEKSILWKCLYGDDKKIFEKKIKNEYGDILNKD
EIKKINSFKFNTWGRLSEKLLTGIEFINLETGECYSSVMEALRRTNYNLMELLSSKFTLQESIDNENKEMNEVSYRDLIEESY
VSPSLKRAILQTLKIYEEIKKITGRVPKKVFIEMARGGDESMKNKKIPARQEQLKKLYDSCGNDIANFSIDIKEMKNSLSSYD
NNSLRQKKLYLYYLQFGKCMYTGREIDLDRLLQNNDTYDIDHIYPRSKVIKDDSFDNLVLVLKNENAEKSNEYPVKKEIQEKM
KSFWRFLKEKNFISDEKYKRLTGKDDFELRGFMARQLVNVRQTTKEVGKILQQIEPEIKIVYSKAEIASSFREMFDFIKVREL
NDTHHAKDAYLNIVAGNVYNTKFTEKPYRYLQEIKENYDVKKIYNYDIKNAWDKENSLEIVKKNMEKNTVNITRFIKEEKGEL
FNLNPIKKGETSNEIISIKPKLYDGKDNKLNEKYGYYTSLKAAYFIYVEHEKKNKKVKTFERITRIDSTLIKNEKNLIKYLVS
QKKLLNPKIIKKIYKEQTLIIDSYPYTFTGVDSNKKVELKNKKQLYLEKKYEQILKNALKFVEDNQGETEENYKFIYLKKRNN
NEKNETIDAVKERYNIEFNEMYDKFLEKLSSKDYKNYINNKLYTNFLNSKEKFKKLKLWEKSLILREFLKIFNKNTYGKYEIK
DSQTKEKLFSFPEDTGRIRLGQSSLGNNKELLEESVTGLFVKKIKL
SEQ ID NO: 29
MKNYTIGLDIGVASVGWVCIDENYKILNYNNRHAFGVHEFESAESAAGRRLKRGMRRRYNRRKKRLQLLQSLFDSYITDSGFF
SKTDSQHFWKNNNEFENRSLTEVLSSLRISSRKYPTIYHLRSDLIESNKKMDLRLVYLALHNLVKYRGHFLQEGNWSEAASAE
GMDDQLLELVTRYAELENLSPLDLSESQWKAAETLLLNRNLTKTDQSKELTAMFGKEYEPFCKLVAGLGVSLHQLFPSSEQAL
AYKETKTKVQLSNENVEEVMELLLEEESALLEAVQPFYQQVVLYELLKGETYVAKAKVSAFKQYQKDMASLKNLLDKTFGEKV
YRSYFISDKNSQREYQKSHKVEVLCKLDQFNKEAKFAETFYKDLKKLLEDKSKTSIGTTEKDEMLRIIKAIDSNQFLQKQKGI
QNAAIPHQNSLYEAEKILRNQQAHYPFITTEWIEKVKQILAFRIPYYIGPLVKDTTQSPFSWVERKGDAPITPWNFDEQIDKA
ASAEAFISRMRKTCTYLKGQEVLPKSSLTYERFEVLNELNGIQLRTTGAESDFRHRLSYEMKCWIIDNVFKQYKTVSTKRLLQ
ELKKSPYADELYDEHTGEIKEVFGTQKENAFATSLSGYISMKSILGAVVDDNPAMTEELIYWIAVFEDREILHLKIQEKYPSI
TDVQRQKLALVKLPGWGRFSRLLIDGLPLDEQGQSVLDHMEQYSSVFMEVLKNKGFGLEKKIQKMNQHQVDGTKKIRYEDIEE
LAGSPALKRGIWRSVKIVEELVSIFGEPANIVLEVAREDGEKKRTKSRKDQWEELTKTTLKNDPDLKSFIGEIKSQGDQRFNE
QRFWLYVTQQGKCLYTGKALDIQNLSMYEVDHILPQNFVKDDSLDNLALVMPEANQRKNQVGQNKMPLEIIEANQQYAMRTLW
ERLHELKLISSGKLGRLKKPSFDEVDKDKFIARQLVETRQIIKHVRDLLDERFSKSDIHLVKAGIVSKFRRFSEIPKIRDYNN
KHHAMDALFAAALIQSILGKYGKNFLAFDLSKKDRQKQWRSVKGSNKEFFLFKNFGNLRLQSPVTGEEVSGVEYMKHVYFELP
WQTTKMTQTGDGMFYKESIFSPKVKQAKYVSPKTEKFVHDEVKNHSICLVEFTFMKKEKEVQETKFIDLKVIEHHQFLKEPES
QLAKFLAEKETNSPIIHARIIRTIPKYQKIWIEHFPYYFISTRELHNARQFEISYELMEKVKQLSERSSVEELKIVFGLLIDQ
MNDNYPIYTKSSIQDRVQKFVDTQLYDFKSFEIGFEELKKAVAANAQRSDTFGSRISKKPKPEEVAIGYESITGLKYRKPRSV
VGTKR
SEQ ID NO: 30
MKKEIKDYFLGLDVGTGSVGWAVTDTDYKLLKANRKDLWGMRCFETAETAEVRRLHRGARRRIERRKKRIKLLQELFSQEIAK
TDEGFFQRMKESPFYAEDKTILQENTLFNDKDFADKTYHKAYPTINHLIKAWIENKVKPDPRLLYLACHNIIKKRGHFLFEGD
FDSENQFDTSIQALFEYLREDMEVDIDADSQKVKEILKDSSLKNSEKQSRLNKILGLKPSDKQKKAITNLISGNKINFADLYD
NPDLKDAEKNSISFSKDDFDALSDDLASILGDSFELLLKAKAVYNCSVLSKVIGDEQYLSFAKVKIYEKHKTDLTKLKNVIKK
HFPKDYKKVFGYNKNEKNNNNYSGYVGVCKTKSKKLIINNSVNQEDFYKFLKTILSAKSEIKEVNDILTEIETGTFLPKQISK
SNAEIPYQLRKMELEKILSNAEKHFSFLKQKDEKGLSHSEKIIMLLTFKIPYYIGPINDNHKKFFPDRCWVVKKEKSPSGKTT
PWNFFDHIDKEKTAEAFITSRTNFCTYLVGESVLPKSSLLYSEYTVLNEINNLQIIIDGKNICDIKLKQKIYEDLFKKYKKIT
QKQISTFIKHEGICNKTDEVIILGIDKECTSSLKSYIELKNIFGKQVDEISTKNMLEEIIRWATIYDEGEGKTILKTKIKAEY
GKYCSDEQIKKILNLKFSGWGRLSRKFLETVTSEMPGFSEPVNIITAMRETQNNLMELLSSEFTFTENIKKINSGFEDAEKQF
SYDGLVKPLFLSPSVKKMLWQTLKLVKEISHITQAPPKKIFIEMAKGAELEPARTKTRLKILQDLYNNCKNDADAFSSEIKDL
SGKIENEDNLRLRSDKLYLYYTQLGKCMYCGKPIEIGHVFDTSNYDIDHIYPQSKIKDDSISNRVLVCSSCNKNKEDKYPLKS
EIQSKQRGFWNFLQRNNFISLEKLNRLTRATPISDDETAKFIARQLVETRQATKVAAKVLEKMFPETKIVYSKAETVSMFRNK
FDIVKCREINDFHHAHDAYLNIVVGNVYNTKFTNNPWNFIKEKRDNPKIADTYNYYKVFDYDVKRNNITAWEKGKTIITVKDM
LKRNTPIYTRQAACKKGELFNQTIMKKGLGQHPLKKEGPFSNISKYGGYNKVSAAYYTLIEYEEKGNKIRSLETIPLYLVKDI
QKDQDVLKSYLTDLLGKKEFKILVPKIKINSLLKINGFPCHITGKTNDSFLLRPAVQFCCSNNEVLYFKKIIRFSEIRSQREK
IGKTISPYEDLSFRSYIKENLWKKTKNDEIGEKEFYDLLQKKNLEIYDMLLTKHKDTIYKKRPNSATIDILVKGKEKFKSLII
ENQFEVILEILKLFSATRNVSDLQHIGGSKYSGVAKIGNKISSLDNCILIYQSITGIFEKRIDLLKV
SEQ ID NO: 31
MEGQMKNNGNNLQQGNYYLGLDVGTSSVGWAVTDTDYNVLKFRGKSMWGARLFDEASTAEERRTHRGNRRRLARRKYRLLLLE
QLFEKEIRKIDDNFFVRLHESNLWADDKSKPSKFLLFNDTNFTDKDYLKKYPTIYHLRSDLIHNSTEHDIRLVFLALHHLIKY
RGHFIYDNSANGDVKTLDEAVSDFEEYLNENDIEFNIENKKEFINVLSDKHLTKKEKKISLKKLYGDITDSENINISVLIEML
SGSSISLSNLFKDIEFDGKQNLSLDSDIEETLNDVVDILGDNIDLLIHAKEVYDIAVLTSSLGKHKYLCDAKVELFEKNKKDL
MILKKYIKKNHPEDYKKIFSSPTEKKNYAAYSQTNSKNVCSQEEFCLFIKPYIRDMVKSENEDEVRIAKEVEDKSFLTKLKGT
NNSVVPYQIHERELNQILKNIVAYLPFMNDEQEDISVVDKIKLIFKFKIPYYVGPLNTKSTRSWVYRSDEKIYPWNFSNVIDL
DKTAHEFMNRLIGRCTYTNDPVLPMDSLLYSKYNVLNEINPIKVNGKAIPVEVKQAIYTDLFENSKKKVTRKSIYIYLLKNGY
IEKEDIVSGIDIEIKSKLKSHHDFTQIVQENKCTPEEIERIIKGILVYSDDKSMLRRWLKNNIKGLSENDVKYLAKLNYKEWG
RLSKTLLTDIYTINPEDGEACSILDIMWNTNATLMEILSNEKYQFKQNIENYKAENYDEKQNLHEELDDMYISPAARRSIWQA
LRIVDEIVDIKKSAPKKIFIEMAREKKSAMKKKRTESRKDTLLELYKSCKSQADGFYDEELFEKLSNESNSRLRRDQLYLYYT
QMGRSMYTGKRIDFDKLINDKNTYDIDHIYPRSKIKDDSITNRVLVEKDINGEKTDIYPISEDIRQKMQPFWKILKEKGLINE
EKYKRLTRNYELTDEELSSFVARQLVETQQSTKALATLLKKEYPSAKIVYSKAGNVSEFRNRKDKELPKFREINDLHHAKDAY
LNIVVGNVYDTKFTEKFFNNIRNENYSLKRVFDFSVPGAWDAKGSTFNTIKKYMAKNNPIIAFAPYEVKGELFDQQIVPKGKG
QFPIKQGKDIEKYGGYNKLSSAFLFAVEYKGKKARERSLETVYIKDVELYLQDPIKYCESVLGLKEPQIIKPKILMGSLFSIN
NKKLVVTGRSGKQYVCHHIYQLSINDEDSQYLKNIAKYLQEEPDGNIERQNILNITSVNNIKLFDVLCTKFNSNTYEIILNSL
KNDVNEGREKFSELDILEQCNILLQLLKAFKCNRESSNLEKLNNKKQAGVIVIPHLFTKCSVFKVIHQSITGLFEKEMDLLK
SEQ ID NO: 32
MGRKPYILSLDIGTGSVGYACMDKGFNVLKYHDKDALGVYLFDGALTAQERRQFRTSRRRKNRRIKRLGLLQELLAPLVQNPN
FYQFQRQFAWKNDNMDFKNKSLSEVLSFLGYESKKYPTIYHLQEALLLKDEKFDPELIYMALYHLVKYRGHFLFDHLKIENLT
NNDNMHDFVELIETYENLNNIKLNLDYEKTKVIYEILKDNEMTKNDRAKRVKNMEKKLEQFSIMLLGLKFNEGKLFNHADNAE
ELKGANQSHTFADNYEENLTPFLTVEQSEFIERANKIYLSLTLQDILKGKKSMAMSKVAAYDKFRNELKQVKDIVYKADSTRT
QFKKIFVSSKKSLKQYDATPNDQTFSSLCLFDQYLIRPKKQYSLLIKELKKIIPQDSELYFEAENDTLLKVLNTTDNASIPMQ
INLYEAETILRNQQKYHAEITDEMIEKVLSLIQFRIPYYVGPLVNDHTASKFGWMERKSNESIKPWNFDEVVDRSKSATQFIR
RMTNKCSYLINEDVLPKNSLLYQEMEVLNELNATQIRLQTDPKNRKYRMMPQIKLFAVEHIFKKYKTVSHSKFLEIMLNSNHR
ENFMNHGEKLSIFGTQDDKKFASKLSSYQDMTKIFGDIEGKRAQIEEIIQWITIFEDKKILVQKLKECYPELTSKQINQLKKL
NYSGWGRLSEKLLTHAYQGHSIIELLRHSDENFMEILTNDVYGFQNFIKEENQVQSNKIQHQDIANLTTSPALKKGIWSTIKL
VRELTSIFGEPEKIIMEFATEDQQKGKKQKSRKQLWDDNIKKNKLKSVDEYKYIIDVANKLNNEQLQQEKLWLYLSQNGKCMY
SGQSIDLDALLSPNATKHYEVDHIFPRSFIKDDSIDNKVLVIKKMNQTKGDQVPLQFIQQPYERIAYWKSLNKAGLISDSKLH
KLMKPEFTAMDKEGFIQRQLVETRQISVHVRDFLKEEYPNTKVIPMKAKMVSEFRKKFDIPKIRQMNDAHHAIDAYLNGVVYH
GAQLAYPNVDLFDFNFKWEKVREKWKALGEFNTKQKSRELFFFKKLEKMEVSQGERLISKIKLDMNHFKINYSRKLANIPQQF
YNQTAVSPKTAELKYESNKSNEVVYKGLTPYQTYVVAIKSVNKKGKEKMEYQMIDHYVFDFYKFQNGNEKELALYLAQRENKD
EVLDAQIVYSLNKGDLLYINNHPCYFVSRKEVINAKQFELTVEQQLSLYNVMNNKETNVEKLLIEYDFIAEKVINEYHHYLNS
KLKEKRVRTFFSESNQTHEDFIKALDELFKVVTASATRSDKIGSRKNSMTHRAFLGKGKDVKIAYTSISGLKTTKPKSLFKLA
ESRNEL
SEQ ID NO: 33
MAKILGLDLGTNSIGWAVVERENIDFSLIDKGVRIFSEGVKSEKGIESSRAAERTGYRSARKIKYRRKLRKYETLKVLSLNRM
CPLSIEEVEEWKKSGFKDYPLNPEFLKWLSTDEESNVNPYFFRDRASKHKVSLFELGRAFYHIAQRRGFLSNRLDQSAEGILE
EHCPKIEAIVEDLISIDEISTNITDYFFETGILDSNEKNGYAKDLDEGDKKLVSLYKSLLAILKKNESDFENCKSEIIERLNK
KDVLGKVKGKIKDISQAMLDGNYKTLGQYFYSLYSKEKIRNQYTSREEHYLSEFITICKVQGIDQINEEEKINEKKFDGLAKD
LYKAIFFQRPLKSQKGLIGKCSFEKSKSRCAISHPDFEEYRMWTYLNTIKIGTQSDKKLRFLTQDEKLKLVPKFYRKNDFNFD
VLAKELIEKGSSFGFYKSSKKNDFFYWFNYKPTDTVAACQVAASLKNAIGEDWKTKSFKYQTINSNKEQVSRTVDYKDLWHLL
TVATSDVYLYEFAIDKLGLDEKNAKAFSKTKLKKDFASLSLSAINKILPYLKEGLLYSHAVFVANIENIVDENIWKDEKQRDY
IKTQISEIIENYTLEKSRFEIINGLLKEYKSENEDGKRVYYSKEAEQSFENDLKKKLVLFYKSNEIENKEQQETIFNELLPIF
IQQLKDYEFIKIQRLDQKVLIFLKGKNETGQIFCTEEKGTAEEKEKKIKNRLKKLYHPSDIEKFKKKIIKDEFGNEKIVLGSP
LTPSIKNPMAMRALHQLRKVLNALILEGQIDEKTIIHIEMARELNDANKRKGIQDYQNDNKKFREDAIKEIKKLYFEDCKKEV
EPTEDDILRYQLWMEQNRSEIYEEGKNISICDIIGSNPAYDIEHTIPRSRSQDNSQMNKTLCSQRFNREVKKQSMPIELNNHL
EILPRIAHWKEEADNLTREIEIISRSIKAAATKEIKDKKIRRRHYLTLKRDYLQGKYDRFIWEEPKVGFKNSQIPDTGIITKY
AQAYLKSYFKKVESVKGGMVAEFRKIWGIQESFIDENGMKHYKVKDRSKHTHHTIDAITIACMTKEKYDVLAHAWTLEDQQNK
KEARSIIEASKPWKTFKEDLLKIEEEILVSHYTPDNVKKQAKKIVRVRGKKQFVAEVERDVNGKAVPKKAASGKTIYKLDGEG
KKLPRLQQGDTIRGSLHQDSIYGAIKNPLNTDEIKYVIRKDLESIKGSDVESIVDEVVKEKIKEAIANKVLLLSSNAQQKNKL
VGTVWMNEEKRIAINKVRIYANSVKNPLHIKEHSLLSKSKHVHKQKVYGQNDENYAMAIYELDGKRDFELINIFNLAKLIKQG
QGFYPLHKKKEIKGKIVFVPIEKRNKRDVVLKRGQQVVFYDKEVENPKDISEIVDFKGRIYIIEGLSIQRIVRPSGKVDEYGV
IMLRYFKEARKADDIKQDNFKPDGVFKLGENKPTRKMNHQFTAFVEGIDFKVLPSGKFEKI
SEQ ID NO: 34
MEFKKVLGLDIGTNSIGCALLSLPKSIQDYGKGGRLEWLTSRVIPLDADYMKAFIDGKNGLPQVITPAGKRRQKRGSRRLKHR
YKLRRSRLIRVFKTLNWLPEDFPLDNPKRIKETISTEGKFSFRISDYVPISDESYREFYREFGYPENEIEQVIEEINFRRKTK
GKNKNPMIKLLPEDWVVYYLRKKALIKPTTKEELIRIIYLFNQRRGFKSSRKDLTETAILDYDEFAKRLAEKEKYSAENYETK
FVSITKVKEVVELKTDGRKGKKRFKVILEDSRIEPYEIERKEKPDWEGKEYTFLVTQKLEKGKFKQNKPDLPKEEDWALCTTA
LDNRMGSKHPGEFFFDELLKAFKEKRGYKIRQYPVNRWRYKKELEFIWTKQCQLNPELNNLNINKEILRKLATVLYPSQSKFF
GPKIKEFENSDVLHIISEDIIYYQRDLKSQKSLISECRYEKRKGIDGEIYGLKCIPKSSPLYQEFRIWQDIHNIKVIRKESEV
NGKKKINIDETQLYINENIKEKLFELFNSKDSLSEKDILELISLNIINSGIKISKKEEETTHRINLFANRKELKGNETKSRYR
KVFKKLGFDGEYILNHPSKLNRLWHSDYSNDYADKEKTEKSILSSLGWKNRNGKWEKSKNYDVFNLPLEVAKAIANLPPLKKE
YGSYSALAIRKMLVVMRDGKYWQHPDQIAKDQENTSLMLFDKNLIQLTNNQRKVLNKYLLTLAEVQKRSTLIKQKLNEIEHNP
YKLELVSDQDLEKQVLKSFLEKKNESDYLKGLKTYQAGYLIYGKHSEKDVPIVNSPDELGEYIRKKLPNNSLRNPIVEQVIRE
TIFIVRDVWKSFGIIDEIHIELGRELKNNSEERKKTSESQEKNFQEKERARKLLKELLNSSNFEHYDENGNKIFSSFTVNPNP
DSPLDIEKFRIWKNQSGLTDEELNKKLKDEKIPTEIEVKKYILWLTQKCRSPYTGKIIPLSKLFDSNVYEIEHIIPRSKMKND
STNNLVICELGVNKAKGDRLAANFISESNGKCKFGEVEYTLLKYGDYLQYCKDTFKYQKAKYKNLLATEPPEDFIERQINDTR
YIGRKLAELLTPVVKDSKNIIFTIGSITSELKITWGLNGVWKDILRPRFKRLESIINKKLIFQDEDDPNKYHFDLSINPQLDK
EGLKRLDHRHHALDATIIAATTREHVRYLNSLNAADNDEEKREYFLSLCNHKIRDFKLPWENFTSEVKSKLLSCVVSYKESKP
ILSDPFNKYLKWEYKNGKWQKVFAIQIKNDRWKAVRRSMFKEPIGTVWIKKIKEVSLKEAIKIQAIWEEVKNDPVRKKKEKYI
YDDYAQKVIAKIVQELGLSSSMRKQDDEKLNKFINEAKVSAGVNKNLNTTNKTIYNLEGRFYEKIKVAEYVLYKAKRMPLNKK
EYIEKLSLQKMFNDLPNFILEKSILDNYPEILKELESDNKYIIEPHKKNNPVNRLLLEHILEYHNNPKEAFSTEGLEKLNKKA
INKIGKPIKYITRLDGDINEEEIFRGAVFETDKGSNVYFVMYENNQTKDREFLKPNPSISVLKAIEHKNKIDFFAPNRLGFSR
IILSPGDLVYVPTNDQYVLIKDNSSNETIINWDDNEFISNRIYQVKKFTGNSCYFLKNDIASLILSYSASNGVGEFGSQNISE
YSVDDPPIRIKDVCIKIRVDRLGNVRPL
SEQ ID NO: 35
MKHILGLDLGTNSIGWALIERNIEEKYGKIIGMGSRIVPMGAELSKFEQGQAQTKNADRRTNRGARRLNKRYKQRRNKLIYIL
QKLDMLPSQIKLKEDFSDPNKIDKITILPISKKQEQLTAFDLVSLRVKALTEKVGLEDLGKIIYKYNQLRGYAGGSLEPEKED
IFDEEQSKDKKNKSFIAFSKIVFLGEPQEEIFKNKKLNRRAIIVETEEGNFEGSTFLENIKVGDSLELLINISASKSGDTITI
KLPNKTNWRKKMENIENQLKEKSKEMGREFYISEFLLELLKENRWAKIRNNTILRARYESEFEAIWNEQVKHYPFLENLDKKT
LIEIVSFIFPGEKESQKKYRELGLEKGLKYIIKNQVVFYQRELKDQSHLISDCRYEPNEKAIAKSHPVFQEYKVWEQINKLIV
NTKIEAGTNRKGEKKYKYIDRPIPTALKEWIFEELQNKKEITFSAIFKKLKAEFDLREGIDFLNGMSPKDKLKGNETKLQLQK
SLGELWDVLGLDSINRQIELWNILYNEKGNEYDLTSDRTSKVLEFINKYGNNIVDDNAEETAIRISKIKFARAYSSLSLKAVE
RILPLVRAGKYFNNDFSQQLQSKILKLLNENVEDPFAKAAQTYLDNNQSVLSEGGVGNSIATILVYDKHTAKEYSHDELYKSY
KEINLLKQGDLRNPLVEQIINEALVLIRDIWKNYGIKPNEIRVELARDLKNSAKERATIHKRNKDNQTINNKIKETLVKNKKE
LSLANIEKVKLWEAQRHLSPYTGQPIPLSDLFDKEKYDVDHIIPISRYFDDSFTNKVISEKSVNQEKANRTAMEYFEVGSLKY
SIFTKEQFIAHVNEYFSGVKRKNLLATSIPEDPVQRQIKDTQYIAIRVKEELNKIVGNENVKTTTGSITDYLRNHWGLTDKFK
LLLKERYEALLESEKFLEAEYDNYKKDFDSRKKEYEEKEVLFEEQELTREEFIKEYKENYIRYKKNKLIIKGWSKRIDHRHHA
IDALIVACTEPAHIKRLNDLNKVLQDWLVEHKSEFMPNFEGSNSELLEEILSLPENERTEIFTQIEKFRAIEMPWKGFPEQVE
QKLKEIIISHKPKDKLLLQYNKAGDRQIKLRGQLHEGTLYGISQGKEAYRIPLTKFGGSKFATEKNIQKIVSPFLSGFIANHL
KEYNNKKEEAFSAEGIMDLNNKLAQYRNEKGELKPHTPISTVKIYYKDPSKNKKKKDEEDLSLQKLDREKAFNEKLYVKTGDN
YLFAVLEGEIKTKKTSQIKRLYDIISFFDATNFLKEEFRNAPDKKTFDKDLLFRQYFEERNKAKLLFTLKQGDFVYLPNENEE
VILDKESPLYNQYWGDLKERGKNIYVVQKFSKKQIYFIKHTIADIIKKDVEFGSQNCYETVEGRSIKENCFKLEIDRLGNIVK
VIKR
SEQ ID NO: 36
MHVEIDFPHFSRGDSHLAMNKNEILRGSSVLYRLGLDLGSNSLGWFVTHLEKRGDRHEPVALGPGGVRIFPDGRDPQSGTSNA
VDRRMARGARKRRDRFVERRKELIAALIKYNLLPDDARERRALEVLDPYALRKTALTDTLPAHHVGRALFHLNQRRGFQSNRK
TDSKQSEDGAIKQAASRLATDKGNETLGVFFADMHLRKSYEDRQTAIRAELVRLGKDHLTGNARKKIWAKVRKRLFGDEVLPR
ADAPHGVRARATITGTKASYDYYPTRDMLRDEFNAIWAGQSAHHATITDEARTEIEHIIFYQRPLKPAIVGKCTLDPATRPFK
EDPEGYRAPWSHPLAQRFRILSEARNLEIRDTGKGSRRLTKEQSDLVVAALLANREVKFDKLRTLLKLPAEARFNLESDRRAA
LDGDQTAARLSDKKGFNKAWRGFPPERQIAIVARLEETEDENELIAWLEKECALDGAAAARVANTTLPDGHCRLGLRAIKKIV
PIMQDGLDEDGVAGAGYHIAAKRAGYDHAKLPTGEQLGRLPYYGQWLQDAVVGSGDARDQKEKQYGQFPNPTVHIGLGQLRRV
VNDLIDKYGPPTEISIEFTRALKLSEQQKAERQREQRRNQDKNKARAEELAKFGRPANPRNLLKMRLWEELAHDPLDRKCVYT
GEQISIERLLSDEVDIDHILPVAMTLDDSPANKIICMRYANRHKRKQTPSEAFGSSPTLQGHRYNWDDIAARATGLPRNKRWR
FDANAREEFDKRGGFLARQLNETGWLARLAKQYLGAVTDPNQIWVVPGRLTSMLRGKWGLNGLLPSDNYAGVQDKAEEFLAST
DDMEFSGVKNRADHRHHAIDGLVTALTDRSLLWKMANAYDEEHEKFVIEPPWPTMRDDLKAALEKMVVSHKPDHGIEGKLHED
SAYGFVKPLDATGLKEEEAGNLVYRKAIESLNENEVDRIRDIQLRTIVRDHVNVEKTKGVALADALRQLQAPSDDYPQFKHGL
RHVRILKKEKGDYLVPIANRASGVAYKAYSAGENFCVEVFETAGGKWDGEAVRRFDANKKNAGPKIAHAPQWRDANEGAKLVM
RIHKGDLIRLDHEGRARIMVVHRLDAAAGRFKLADHNETGNLDKRHATNNDIDPFRWLMASYNTLKKLAAVPVRVDELGRVWR
VMPN
SEQ ID NO: 37
METTLGIDLGTNSIGLALVDQEEHQILYSGVRIFPEGINKDTIGLGEKEESRNATRRAKRQMRRQYFRKKLRKAKLLELLIAY
DMCPLKPEDVRRWKNWDKQQKSTVRQFPDTPAFREWLKQNPYELRKQAVTEDVTRPELGRILYQMIQRRGFLSSRKGKEEGKI
FTGKDRMVGIDETRKNLQKQTLGAYLYDIAPKNGEKYRFRTERVRARYTLRDMYIREFEIIWQRQAGHLGLAHEQATRKKNIF
LEGSATNVRNSKLITHLQAKYGRGHVLIEDTRITVTFQLPLKEVLGGKIEIEEEQLKFKSNESVLFWQRPLRSQKSLLSKCVF
EGRNFYDPVHQKWIIAGPTPAPLSHPEFEEFRAYQFINNIIYGKNEHLTAIQREAVFELMCTESKDFNFEKIPKHLKLFEKFN
FDDTTKVPACTTISQLRKLFPHPVWEEKREEIWHCFYFYDDNTLLFEKLQKDYALQTNDLEKIKKIRLSESYGNVSLKAIRRI
NPYLKKGYAYSTAVLLGGIRNSFGKRFEYFKEYEPEIEKAVCRILKEKNAEGEVIRKIKDYLVHNRFGFAKNDRAFQKLYHHS
QAITTQAQKERLPETGNLRNPIVQQGLNELRRTVNKLLATCREKYGPSFKFDHIHVEMGRELRSSKTEREKQSRQIRENEKKN
EAAKVKLAEYGLKAYRDNIQKYLLYKEIEEKGGTVCCPYTGKTLNISHTLGSDNSVQIEHIIPYSISLDDSLANKTLCDATFN
REKGELTPYDFYQKDPSPEKWGASSWEEIEDRAFRLLPYAKAQRFIRRKPQESNEFISRQLNDTRYISKKAVEYLSAICSDVK
AFPGQLTAELRHLWGLNNILQSAPDITFPLPVSATENHREYYVITNEQNEVIRLFPKQGETPRTEKGELLLTGEVERKVFRCK
GMQEFQTDVSDGKYWRRIKLSSSVTWSPLFAPKPISADGQIVLKGRIEKGVFVCNQLKQKLKTGLPDGSYWISLPVISQTFKE
GESVNNSKLTSQQVQLFGRVREGIFRCHNYQCPASGADGNFWCTLDTDTAQPAFTPIKNAPPGVGGGQIILTGDVDDKGIFHA
DDDLHYELPASLPKGKYYGIFTVESCDPTLIPIELSAPKTSKGENLIEGNIWVDEHTGEVRFDPKKNREDQRHHAIDAIVIAL
SSQSLFQRLSTYNARRENKKRGLDSTEHFPSPWPGFAQDVRQSVVPLLVSYKQNPKTLCKISKTLYKDGKKIHSCGNAVRGQL
HKETVYGQRTAPGATEKSYHIRKDIRELKTSKHIGKVVDITIRQMLLKHLQENYHIDITQEFNIPSNAFFKEGVYRIFLPNKH
GEPVPIKKIRMKEELGNAERLKDNINQYVNPRNNHHVMIYQDADGNLKEEIVSFWSVIERQNQGQPIYQLPREGRNIVSILQI
NDTFLIGLKEEEPEVYRNDLSTLSKHLYRVQKLSGMYYTFRHHLASTLNNEREEFRIQSLEAWKRANPVKVQIDEIGRITFLN
GPLC
SEQ ID NO: 38
MESSQILSPIGIDLGGKFTGVCLSHLEAFAELPNHANTKYSVILIDHNNFQLSQAQRRATRHRVRNKKRNQFVKRVALQLFQH
ILSRDLNAKEETALCHYLNNRGYTYVDTDLDEYIKDETTINLLKELLPSESEHNFIDWFLQKMQSSEFRKILVSKVEEKKDDK
ELKNAVKNIKNFITGFEKNSVEGHRHRKVYFENIKSDITKDNQLDSIKKKIPSVCLSNLLGHLSNLQWKNLHRYLAKNPKQFD
EQTFGNEFLRMLKNFRHLKGSQESLAVRNLIQQLEQSQDYISILEKTPPEITIPPYEARTNTGMEKDQSLLLNPEKLNNLYPN
WRNLIPGIIDAHPFLEKDLEHTKLRDRKRIISPSKQDEKRDSYILQRYLDLNKKIDKFKIKKQLSFLGQGKQLPANLIETQKE
METHFNSSLVSVLIQIASAYNKEREDAAQGIWFDNAFSLCELSNINPPRKQKILPLLVGAILSEDFINNKDKWAKFKIFWNTH
KIGRTSLKSKCKEIEEARKNSGNAFKIDYEEALNHPEHSNNKALIKIIQTIPDIIQAIQSHLGHNDSQALIYHNPFSLSQLYT
ILETKRDGFHKNCVAVTCENYWRSQKTEIDPEISYASRLPADSVRPFDGVLARMMQRLAYEIAMAKWEQIKHIPDNSSLLIPI
YLEQNRFEFEESFKKIKGSSSDKTLEQAIEKQNIQWEEKFQRIINASMNICPYKGASIGGQGEIDHIYPRSLSKKHFGVIFNS
EVNLIYCSSQGNREKKEEHYLLEHLSPLYLKHQFGTDNVSDIKNFISQNVANIKKYISFHLLTPEQQKAARHALFLDYDDEAF
KTITKFLMSQQKARVNGTQKFLGKQIMEFLSTLADSKQLQLEFSIKQITAEEVHDHRELLSKQEPKLVKSRQQSFPSHAIDAT
LTMSIGLKEFPQFSQELDNSWFINHLMPDEVHLNPVRSKEKYNKPNISSTPLFKDSLYAERFIPVWVKGETFAIGFSEKDLFE
IKPSNKEKLFTLLKTYSTKNPGESLQELQAKSKAKWLYFPINKTLALEFLHHYFHKEIVTPDDTTVCHFINSLRYYTKKESIT
VKILKEPMPVLSVKFESSKKNVLGSFKHTIALPATKDWERLFNHPNFLALKANPAPNPKEFNEFIRKYFLSDNNPNSDIPNNG
HNIKPQKHKAVRKVFSLPVIPGNAGTMMRIRRKDNKGQPLYQLQTIDDTPSMGIQINEDRLVKQEVLMDAYKTRNLSTIDGIN
NSEGQAYATFDNWLTLPVSTFKPEIIKLEMKPHSKTRRYIRITQSLADFIKTIDEALMIKPSDSIDDPLNMPNEIVCKNKLFG
NELKPRDGKMKIVSTGKIVTYEFESDSTPQWIQTLYVTQLKKQP
SEQ ID NO: 39
MKKIVGLDLGTNSIGWALINAYINKEHLYGIEACGSRIIPMDAAILGNFDKGNSISQTADRTSYRGIRRLRERHLLRRERLHR
ILDLLGFLPKHYSDSLNRYGKFLNDIECKLPWVKDETGSYKFIFQESFKEMLANFTEHHPILIANNKKVPYDWTIYYLRKKAL
TQKISKEELAWILLNFNQKRGYYQLRGEEEETPNKLVEYYSLKVEKVEDSGERKGKDTWYNVHLENGMIYRRTSNIPLDWEGK
TKEFIVTTDLEADGSPKKDKEGNIKRSFRAPKDDDWTLIKKKTEADIDKIKMTVGAYIYDTLLQKPDQKIRGKLVRTIERKYY
KNELYQILKTQSEFHEELRDKQLYIACLNELYPNNEPRRNSISTRDFCHLFIEDIIFYQRPLKSKKSLIDNCPYEENRYIDKE
SGEIKHASIKCIAKSHPLYQEFRLWQFIVNLRIYRKETDVDVTQELLPTEADYVTLFEWLNEKKEIDQKAFFKYPPFGFKKTT
SNYRWNYVEDKPYPCNETHAQIIARLGKAHIPKAFLSKEKEETLWHILYSIEDKQEIEKALHSFANKNNLSEEFIEQFKNFPP
FKKEYGSYSAKAIKKLLPLMRMGKYWSIENIDNGTRIRINKIIDGEYDENIRERVRQKAINLTDITHFRALPLWLACYLVYDR
HSEVKDIVKWKTPKDIDLYLKSFKQHSLRNPIVEQVITETLRTVRDIWQQVGHIDEIHIELGREMKNPADKRARMSQQMIKNE
NTNLRIKALLTEFLNPEFGIENVRPYSPSQQDLLRIYEEGVLNSILELPEDIGIILGKFNQTDTLKRPTRSEILRYKLWLEQK
YRSPYTGEMIPLSKLFTPAYEIEHIIPQSRYFDDSLSNKVICESEINKLKDRSLGYEFIKNHHGEKVELAFDKPVEVLSVEAY
EKLVHESYSHNRSKMKKLLMEDIPDQFIERQLNDSRYISKVVKSLLSNIVREENEQEAISKNVIPCTGGITDRLKKDWGINDV
WNKIVLPRFIRLNELTESTRFTSINTNNTMIPSMPLELQKGFNKKRIDHRHHAMDAIIIACANRNIVNYLNNVSASKNTKITR
RDLQTLLCHKDKTDNNGNYKWVIDKPWETFTQDTLTALQKITVSFKQNLRVINKTTNHYQHYENGKKIVSNQSKGDSWAIRKS
MHKETVHGEVNLRMIKTVSFNEALKKPQAIVEMDLKKKILAMLELGYDTKRIKNYFEENKDTWQDINPSKIKVYYFTKETKDR
YFAVRKPIDTSFDKKKIKESITDTGIQQIMLRHLETKDNDPTLAFSPDGIDEMNRNILILNKGKKHQPIYKVRVYEKAEKFTV
GQKGNKRTKFVEAAKGTNLFFAIYETEEIDKDTKKVIRKRSYSTIPLNVVIERQKQGLSSAPEDENGNLPKYILSPNDLVYVP
TQEEINKGEVVMPIDRDRIYKMVDSSGITANFIPASTANLIFALPKATAEIYCNGENCIQNEYGIGSPQSKNQKAITGEMVKE
ICFPIKVDRLGNIIQVGSCILTN
SEQ ID NO: 40
MSRSLTFSFDIGYASIGWAVIASASHDDADPSVCGCGTVLFPKDDCQAFKRREYRRLRRNIRSRRVRIERIGRLLVQAQIITP
EMKETSGHPAPFYLASEALKGHRTLAPIELWHVLRWYAHNRGYDNNASWSNSLSEDGGNGEDTERVKHAQDLMDKHGTATMAE
TICRELKLEEGKADAPMEVSTPAYKNLNTAFPRLIVEKEVRRILELSAPLIPGLTAEIIELIAQHHPLTTEQRGVLLQHGIKL
ARRYRGSLLFGQLIPRFDNRIISRCPVTWAQVYEAELKKGNSEQSARERAEKLSKVPTANCPEFYEYRMARILCNIRADGEPL
SAEIRRELMNQARQEGKLTKASLEKAISSRLGKETETNVSNYFTLHPDSEEALYLNPAVEVLQRSGIGQILSPSVYRIAANRL
RRGKSVTPNYLLNLLKSRGESGEALEKKIEKESKKKEADYADTPLKPKYATGRAPYARTVLKKVVEEILDGEDPTRPARGEAH
PDGELKAHDGCLYCLLDTDSSVNQHQKERRLDTMTNNHLVRHRMLILDRLLKDLIQDFADGQKDRISRVCVEVGKELTTFSAM
DSKKIQRELTLRQKSHTDAVNRLKRKLPGKALSANLIRKCRIAMDMNWTCPFTGATYGDHELENLELEHIVPHSFRQSNALSS
LVLTWPGVNRMKGQRTGYDFVEQEQENPVPDKPNLHICSLNNYRELVEKLDDKKGHEDDRRRKKKRKALLMVRGLSHKHQSQN
HEAMKEIGMTEGMMTQSSHLMKLACKSIKTSLPDAHIDMIPGAVTAEVRKAWDVFGVFKELCPEAADPDSGKILKENLRSLTH
LHHALDACVLGLIPYIIPAHHNGLLRRVLAMRRIPEKLIPQVRPVANQRHYVLNDDGRMMLRDLSASLKENIREQLMEQRVIQ
HVPADMGGALLKETMQRVLSVDGSGEDAMVSLSKKKDGKKEKNQVKASKLVGVFPEGPSKLKALKAAIEIDGNYGVALDPKPV
VIRHIKVFKRIMALKEQNGGKPVRILKKGMLIHLTSSKDPKHAGVWRIESIQDSKGGVKLDLQRAHCAVPKNKTHECNWREVD
LISLLKKYQMKRYPTSYTGTPR
SEQ ID NO: 41
MTQKVLGLDLGTNSIGSAVRNLDLSDDLQWQLEFFSSDIFRSSVNKESNGREYSLAAQRSAHRRSRGLNEVRRRRLWATLNLL
IKHGFCPMSSESLMRWCTYDKRKGLFREYPIDDKDFNAWILLDFNGDGRPDYSSPYQLRRELVTRQFDFEQPIERYKLGRALY
HIAQHRGFKSSKGETLSQQETNSKPSSTDEIPDVAGAMKASEEKLSKGLSTYMKEHNLLTVGAAFAQLEDEGVRVRNNNDYRA
IRSQFQHEIETIFKFQQGLSVESELYERLISEKKNVGTIFYKRPLRSQRGNVGKCTLERSKPRCAIGHPLFEKFRAWTLINNI
KVRMSVDTLDEQLPMKLRLDLYNECFLAFVRTEFKFEDIRKYLEKRLGIHFSYNDKTINYKDSTSVAGCPITARFRKMLGEEW
ESFRVEGQKERQAHSKNNISFHRVSYSIEDIWHFCYDAEEPEAVLAFAQETLRLERKKAEELVRIWSAMPQGYAMLSQKAIRN
INKILMLGLKYSDAVILAKVPELVDVSDEELLSIAKDYYLVEAQVNYDKRINSIVNGLIAKYKSVSEEYRFADHNYEYLLDES
DEKDIIRQIENSLGARRWSLMDANEQTDILQKVRDRYQDFFRSHERKFVESPKLGESFENYLTKKFPMVEREQWKKLYHPSQI
TIYRPVSVGKDRSVLRLGNPDIGAIKNPTVLRVLNTLRRRVNQLLDDGVISPDETRVVVETARELNDANRKWALDTYNRIRHD
ENEKIKKILEEFYPKRDGISTDDIDKARYVIDQREVDYFTGSKTYNKDIKKYKFWLEQGGQCMYTGRTINLSNLFDPNAFDIE
HTIPESLSFDSSDMNLTLCDAHYNRFIKKNHIPTDMPNYDKAITIDGKEYPAITSQLQRWVERVERLNRNVEYWKGQARRAQN
KDRKDQCMREMHLWKMELEYWKKKLERFTVIEVIDGFKNSQLVDTRVITRHAVLYLKSIFPHVDVQRGDVTAKFRKILGIQSV
DEKKDRSLHSHHAIDATTLTIIPVSAKRDRMLELFAKIEEINKMLSFSGSEDRTGLIQELEGLKNKLQMEVKVCRIGHNVSEI
GTFINDNIIVNHHIKNQALTPVRRRLRKKGYIVGGVDNPRWQTGDALRGEIHKASYYGAITQFAKDDEGKVLMKEGRPQVNPT
IKFVIRRELKYKKSAADSGFASWDDLGKAIVDKELFALMKGQFPAETSFKDACEQGIYMIKKGKNGMPDIKLHHIRHVRCEAP
QSGLKIKEQTYKSEKEYKRYFYAAVGDLYAMCCYTNGKIREFRIYSLYDVSCHRKSDIEDIPEFITDKKGNRLMLDYKLRTGD
MILLYKDNPAELYDLDNVNLSRRLYKINRFESQSNLVLMTHHLSTSKERGRSLGKTVDYQNLPESIRSSVKSLNFLIMGENRD
FVIKNGKIIFNHR
SEQ ID NO: 42
MLVSPISVDLGGKNTGFFSFTDSLDNSQSGTVIYDESFVLSQVGRRSKRHSKRNNLRNKLVKRLFLLILQEHHGLSIDVLPDE
IRGLFNKRGYTYAGFELDEKKKDALESDTLKEFLSEKLQSIDRDSDVEDFLNQIASNAESFKDYKKGFEAVFASATHSPNKKL
ELKDELKSEYGENAKELLAGLRVTKEILDEFDKQENQGNLPRAKYFEELGEYIATNEKVKSFFDSNSLKLTDMTKLIGNISNY
QLKELRRYFNDKEMEKGDIWIPNKLHKITERFVRSWHPKNDADRQRRAELMKDLKSKEIMELLTTTEPVMTIPPYDDMNNRGA
VKCQTLRLNEEYLDKHLPNWRDIAKRLNHGKFNDDLADSTVKGYSEDSTLLHRLLDTSKEIDIYELRGKKPNELLVKTLGQSD
ANRLYGFAQNYYELIRQKVRAGIWVPVKNKDDSLNLEDNSNMLKRCNHNPPHKKNQIHNLVAGILGVKLDEAKFAEFEKELWS
AKVGNKKLSAYCKNIEELRKTHGNTFKIDIEELRKKDPAELSKEEKAKLRLTDDVILNEWSQKIANFFDIDDKHRQRFNNLFS
MAQLHTVIDTPRSGFSSTCKRCTAENRFRSETAFYNDETGEFHKKATATCQRLPADTQRPFSGKIERYIDKLGYELAKIKAKE
LEGMEAKEIKVPIILEQNAFEYEESLRKSKTGSNDRVINSKKDRDGKKLAKAKENAEDRLKDKDKRIKAFSSGICPYCGDTIG
DDGEIDHILPRSHTLKIYGTVFNPEGNLIYVHQKCNQAKADSIYKLSDIKAGVSAQWIEEQVANIKGYKTFSVLSAEQQKAFR
YALFLQNDNEAYKKVVDWLRTDQSARVNGTQKYLAKKIQEKLTKMLPNKHLSFEFILADATEVSELRRQYARQNPLLAKAEKQ
APSSHAIDAVMAFVARYQKVFKDGTPPNADEVAKLAMLDSWNPASNEPLTKGLSTNQKIEKMIKSGDYGQKNMREVFGKSIFG
ENAIGERYKPIVVQEGGYYIGYPATVKKGYELKNCKVVTSKNDIAKLEKIIKNQDLISLKENQYIKIFSINKQTISELSNRYF
NMNYKNLVERDKEIVGLLEFIVENCRYYTKKVDVKFAPKYIHETKYPFYDDWRRFDEAWRYLQENQNKTSSKDRFVIDKSSLN
EYYQPDKNEYKLDVDTQPIWDDFCRWYFLDRYKTANDKKSIRIKARKTFSLLAESGVQGKVFRAKRKIPTGYAYQALPMDNNV
IAGDYANILLEANSKTLSLVPKSGISIEKQLDKKLDVIKKTDVRGLAIDNNSFFNADFDTHGIRLIVENTSVKVGNFPISAID
KSAKRMIFRALFEKEKGKRKKKTTISFKESGPVQDYLKVFLKKIVKIQLRTDGSISNIVVRKNAADFTLSFRSEHIQKLLK
SEQ ID NO: 43
MAYRLGLDIGITSVGWAVVALEKDESGLKPVRIQDLGVRIFDKAEDSKTGASLALPRREARSARRRTRRRRHRLWRVKRLLEQ
HGILSMEQIEALYAQRTSSPDVYALRVAGLDRCLIAEEIARVLIHIAHRRGFQSNRKSEIKDSDAGKLLKAVQENENLMQSKG
YRTVAEMLVSEATKTDAEGKLVHGKKHGYVSNVRNKAGEYRHTVSRQAIVDEVRKIFAAQRALGNDVMSEELEDSYLKILCSQ
RNFDDGPGGDSPYGHGSVSPDGVRQSIYERMVGSCTFETGEKRAPRSSYSFERFQLLTKVVNLRIYRQQEDGGRYPCELTQTE
RARVIDCAYEQTKITYGKLRKLLDMKDTESFAGLTYGLNRSRNKTEDTVFVEMKFYHEVRKALQRAGVFIQDLSIETLDQIGW
ILSVWKSDDNRRKKLSTLGLSDNVIEELLPLNGSKFGHLSLKAIRKILPFLEDGYSYDVACELAGYQFQGKTEYVKQRLLPPL
GEGEVTNPVVRRALSQAIKVVNAVIRKHGSPESIHIELARELSKNLDERRKIEKAQKENQKNNEQIKDEIREILGSAHVTGRD
IVKYKLFKQQQEFCMYSGEKLDVTRLFEPGYAEVDHIIPYGISFDDSYDNKVLVKTEQNRQKGNRTPLEYLRDKPEQKAKFIA
LVESIPLSQKKKNHLLMDKRAIDLEQEGFRERNLSDTRYITRALMNHIQAWLLFDETASTRSKRVVCVNGAVTAYMRARWGLT
KDRDAGDKHHAADAVVVACIGDSLIQRVTKYDKFKRNALADRNRYVQQVSKSEGITQYVDKETGEVFTWESFDERKFLPNEPL
EPWPFFRDELLARLSDDPSKNIRAIGLLTYSETEQIDPIFVSRMPTRKVTGAAHKETIRSPRIVKVDDNKGTEIQVVVSKVAL
TELKLTKDGEIKDYFRPEDDPRLYNTLRERLVQFGGDAKAAFKEPVYKISKDGSVRTPVRKVKIQEKLTLGVPVHGGRGIAEN
GGMVRIDVFAKGGKYYFVPIYVADVLKRELPNRLATAHKPYSEWRVVDDSYQFKFSLYPNDAVMIKPSREVDITYKDRKEPVG
CRIMYFVSANIASASISLRTHDNSGELEGLGIQGLEVFEKYVVGPLGDTHPVYKERRMPFRVERKMN
SEQ ID NO: 44
MPVLSPLSPNAAQGRRRWSLALDIGEGSIGWAVAEVDAEGRVLQLTGTGVTLFPSAWSNENGTYVAHGAADRAVRGQQQRHDS
RRRRLAGLARLCAPVLERSPEDLKDLTRTPPKADPRAIFFLRADAARRPLDGPELFRVLHHMAAHRGIRLAELQEVDPPPESD
ADDAAPAATEDEDGTRRAAADERAFRRLMAEHMHRHGTQPTCGEIMAGRLRETPAGAQPVTRARDGLRVGGGVAVPTRALIEQ
EFDAIRAIQAPRHPDLPWDSLRRLVLDQAPIAVPPATPCLFLEELRRRGETFQGRTITREAIDRGLTVDPLIQALRIRETVGN
LRLHERITEPDGRQRYVPRAMPELGLSHGELTAPERDTLVRALMHDPDGLAAKDGRIPYTRLRKLIGYDNSPVCFAQERDTSG
GGITVNPTDPLMARWIDGWVDLPLKARSLYVRDVVARGADSAALARLLAEGAHGVPPVAAAAVPAATAAILESDIMQPGRYSV
CPWAAEAILDAWANAPTEGFYDVTRGLFGFAPGEIVLEDLRRARGALLAHLPRTMAAARTPNRAAQQRGPLPAYESVIPSQLI
TSLRRAHKGRAADWSAADPEERNPFLRTWTGNAATDHILNQVRKTANEVITKYGNRRGWDPLPSRITVELAREAKHGVIRRNE
IAKENRENEGRRKKESAALDTFCQDNTVSWQAGGLPKERAALRLRLAQRQEFFCPYCAERPKLRATDLFSPAETEIDHVIERR
MGGDGPDNLVLAHKDCNNAKGKKTPHEHAGDLLDSPALAALWQGWRKENADRLKGKGHKARTPREDKDFMDRVGWRFEEDARA
KAEENQERRGRRMLHDTARATRLARLYLAAAVMPEDPAEIGAPPVETPPSPEDPTGYTAIYRTISRVQPVNGSVTHMLRQRLL
QRDKNRDYQTHHAEDACLLLLAGPAVVQAFNTEAAQHGADAPDDRPVDLMPTSDAYHQQRRARALGRVPLATVDAALADIVMP
ESDRQDPETGRVHWRLTRAGRGLKRRIDDLTRNCVILSRPRRPSETGTPGALHNATHYGRREITVDGRTDTVVTQRMNARDLV
ALLDNAKIVPAARLDAAAPGDTILKEICTEIADRHDRVVDPEGTHARRWISARLAALVPAHAEAVARDIAELADLDALADADR
TPEQEARRSALRQSPYLGRAISAKKADGRARAREQEILTRALLDPHWGPRGLRHLIMREARAPSLVRIRANKTDAFGRPVPDA
AVWVKTDGNAVSQLWRLTSVVTDDGRRIPLPKPIEKRIEISNLEYARLNGLDEGAGVTGNNAPPRPLRQDIDRLTPLWRDHGT
APGGYLGTAVGELEDKARSALRGKAMRQTLTDAGITAEAGWRLDSEGAVCDLEVAKGDTVKKDGKTYKVGVITQGIFGMPVDA
AGSAPRTPEDCEKFEEQYGIKPWKAKGIPLA
SEQ ID NO: 45
MNYTEKEKLFMKYILALDIGIASVGWAILDKESETVIEAGSNIFPEASAADNQLRRDMRGAKRNNRRLKTRINDFIKLWENNN
LSIPQFKSTEIVGLKVRAITEEITLDELYLILYSYLKHRGISYLEDALDDTVSGSSAYANGLKLNAKELETHYPCEIQQERLN
TIGKYRGQSQIINENGEVLDLSNVFTIGAYRKEIQRVFEIQKKYHPELTDEFCDGYMLIFNRKRKYYEGPGNEKSRTDYGRFT
TKLDANGNYITEDNIFEKLIGKCSVYPDELRAAAASYTAQEYNVLNDLNNLTINGRKLEENEKHEIVERIKSSNTINMRKIIS
DCMGENIDDFAGARIDKSGKEIFHKFEVYNKMRKALLEIGIDISNYSREELDEIGYIMTINTDKEAMMEAFQKSWIDLSDDVK
QCLINMRKTNGALFNKWQSFSLKIMNELIPEMYAQPKEQMTLLTEMGVTKGTQEEFAGLKYIPVDVVSEDIFNPVVRRSVRIS
FKILNAVLKKYKALDTIVIEMPRDRNSEEQKKRINDSQKLNEKEMEYIEKKLAVTYGIKLSPSDFSSQKQLSLKLKLWNEQDG
ICLYSGKTIDPNDIINNPQLFEIDHIIPRSISFDDARSNKVLVYRSENQKKGNQTPYYYLTHSHSEWSFEQYKATVMNLSKKK
EYAISRKKIQNLLYSEDITKMDVLKGFINRNINDTSYASRLVLNTIQNFFMANEADTKVKVIKGSYTHQMRCNLKLDKNRDES
YSHHAVDAMLIGYSELGYEAYHKLQGEFIDFETGEILRKDMWDENMSDEVYADYLYGKKWANIRNEVVKAEKNVKYWHYVMRK
SNRGLCNQTIRGTREYDGKQYKINKLDIRTKEGIKVFAKLAFSKKDSDRERLLVYLNDRRTFDDLCKIYEDYSDAANPFVQYE
KETGDIIRKYSKKHNGPRIDKLKYKDGEVGACIDISHKYGFEKGSKKVILESLVPYRMDVYYKEENHSYYLVGVKQSDIKFEK
GRNVIDEEAYARILVNEKMIQPGQSRADLENLGFKFKLSFYKNDIIEYEKDGKIYTERLVSRTMPKQRNYIETKPIDKAKFEK
QNLVGLGKTKFIKKYRYDILGNKYSCSEEKFTSFC
SEQ ID NO: 46
MLRLYCANNLVLNNVQNLWKYLLLLIFDKKIIFLFKIKVILIRRYMENNNKEKIVIGFDLGVASVGWSIVNAETKEVIDLGVR
LFSEPEKADYRRAKRTTRRLLRRKKFKREKFHKLILKNAEIFGLQSRNEILNVYKDQSSKYRNILKLKINALKEEIKPSELVW
ILRDYLQNRGYFYKNEKLTDEFVSNSFPSKKLHEHYEKYGFFRGSVKLDNKLDNKKDKAKEKDEEEESDAKKESEELIFSNKQ
WINEIVKVFENQSYLTESFKEEYLKLFNYVRPFNKGPGSKNSRTAYGVFSTDIDPETNKFKDYSNIWDKTIGKCSLFEEEIRA
PKNLPSALIFNLQNEICTIKNEFTEFKNWWLNAEQKSEILKFVFTELFNWKDKKYSDKKFNKNLQDKIKKYLLNFALENFNLN
EEILKNRDLENDTVLGLKGVKYYEKSNATADAALEFSSLKPLYVFIKFLKEKKLDLNYLLGLENTEILYFLDSIYLAISYSSD
LKERNEWFKKLLKELYPKIKNNNLEIIENVEDIFEITDQEKFESFSKTHSLSREAFNHIIPLLLSNNEGKNYESLKHSNEELK
KRTEKAELKAQQNQKYLKDNFLKEALVPLSVKTSVLQAIKIFNQIIKNFGKKYEISQVVIEMARELTKPNLEKLLNNATNSNI
KILKEKLDQTEKFDDFTKKKFIDKIENSVVFRNKLFLWFEQDRKDPYTQLDIKINEIEDETEIDHVIPYSKSADDSWFNKLLV
KKSTNQLKKNKTVWEYYQNESDPEAKWNKFVAWAKRIYLVQKSDKESKDNSEKNSIFKNKKPNLKFKNITKKLFDPYKDLGFL
ARNLNDTRYATKVFRDQLNNYSKHHSKDDENKLFKWCMNGSITSFLRKSMVVRKNEEQVYRFNFWKKDRDQFFHHAVDASIIA
IFSLLTKTLYNKLRVYESYDVQRREDGVYLINKETGEVKKADKDYWKDQHNFLKIRENAIEIKNVLNNVDFQNQVRYSRKANT
KLNTQLFNETLYGVKEFENNFYKLEKVNLFSRKDLRKFILEDLNEESEKNKKNENGSRKRILTEKYIVDEILQILENEEFKDS
KSDINALNKYMDSLPSKFSEFFSQDFINKCKKENSLILTFDAIKHNDPKKVIKIKNLKFFREDATLKNKQAVHKDSKNQIKSF
YESYKCVGFIWLKNKNDLEESIFVPINSRVIHFGDKDKDIFDFDSYNKEKLLNEINLKRPENKKFNSINEIEFVKFVKPGALL
LNFENQQIYYISTLESSSLRAKIKLLNKMDKGKAVSMKKITNPDEYKIIEHVNPLGINLNWTKKLENNN
SEQ ID NO: 47
MLMSKHVLGLDLGVGSIGWCLIALDAQGDPAEILGMGSRVVPLNNATKAIEAFNAGAAFTASQERTARRTMRRGFARYQLRRY
RLRRELEKVGMLPDAALIQLPLLELWELRERAATAGRRLTLPELGRVLCHINQKRGYRHVKSDAAAIVGDEGEKKKDSNSAYL
AGIRANDEKLQAEHKTVGQYFAEQLRQNQSESPTGGISYRIKDQIFSRQCYIDEYDQIMAVQRVHYPDILTDEFIRMLRDEVI
FMQRPLKSCKHLVSLCEFEKQERVMRVQQDDGKGGWQLVERRVKFGPKVAPKSSPLFQLCCIYEAVNNIRLTRPNGSPCDITP
EERAKIVAHLQSSASLSFAALKKLLKEKALIADQLTSKSGLKGNSTRVALASALQPYPQYHHLLDMELETRMMTVQLTDEETG
EVTEREVAVVTDSYVRKPLYRLWHILYSIEEREAMRRALITQLGMKEEDLDGGLLDQLYRLDFVKPGYGNKSAKFICKLLPQL
QQGLGYSEACAAVGYRHSNSPTSEEITERTLLEKIPLLQRNELRQPLVEKILNQMINLVNALKAEYGIDEVRVELARELKMSR
EERERMARNNKDREERNKGVAAKIRECGLYPTKPRIQKYMLWKEAGRQCLYCGRSIEEEQCLREGGMEVEHIIPKSVLYDDSY
GNKTCACRRCNKEKGNRTALEYIRAKGREAEYMKRINDLLKEKKISYSKHQRLRWLKEDIPSDFLERQLRLTQYISRQAMAIL
QQGIRRVSASEGGVTARLRSLWGYGKILHTLNLDRYDSMGETERVSREGEATEELHITNWSKRMDHRHHAIDALVVACTRQSY
IQRLNRLSSEFGREDKKKEDQEAQEQQATETGRLSNLERWLTQRPHFSVRTVSDKVAEILISYRPGQRVVTRGRNIYRKKMAD
GREVSCVQRGVLVPRGELMEASFYGKILSQGRVRIVKRYPLHDLKGEVVDPHLRELITTYNQELKSREKGAPIPPLCLDKDKK
QEVRSVRCYAKTLSLDKAIPMCFDEKGEPTAFVKSASNHHLALYRTPKGKLVESIVTFWDAVDRARYGIPLVITHPREVMEQV
LQRGDIPEQVLSLLPPSDWVFVDSLQQDEMVVIGLSDEELQRALEAQNYRKISEHLYRVQKMSSSYYVFRYHLETSVADDKNT
SGRIPKFHRVQSLKAYEERNIRKVRVDLLGRISLL
SEQ ID NO: 48
MSDLVLGLDIGIGSVGVGILNKVTGEIIHKNSRIFPAAQAENNLVRRTNRQGRRLARRKKHRRVRLNRLFEESGLITDFTKIS
INLNPYQLRVKGLTDELSNEELFIALKNMVKHRGISYLDDASDDGNSSVGDYAQIVKENSKQLETKTPGQIQLERYQTYGQLR
GDFTVEKDGKKHRLINVFPTSAYRSEALRILQTQQEFNPQITDEFINRYLEILTGKRKYYHGPGNEKSRTDYGRYRTSGETLD
NIFGILIGKCTFYPDEFRAAKASYTAQEFNLLNDLNNLTVPTETKKLSKEQKNQIINYVKNEKAMGPAKLFKYIAKLLSCDVA
DIKGYRIDKSGKAEIHTFEAYRKMKTLETLDIEQMDRETLDKLAYVLTLNTEREGIQEALEHEFADGSFSQKQVDELVQFRKA
NSSIFGKGWHNFSVKLMMELIPELYETSEEQMTILTRLGKQKTTSSSNKTKYIDEKLLTEEIYNPVVAKSVRQAIKIVNAAIK
EYGDFDNIVIEMARETNEDDEKKAIQKIQKANKDEKDAAMLKAANQYNGKAELPHSVFHGHKQLATKIRLWHQQGERCLYTGK
TISIHDLINNSNQFEVDHILPLSITFDDSLANKVLVYATANQEKGQRTPYQALDSMDDAWSFRELKAFVRESKTLSNKKKEYL
LTEEDISKFDVRKKFIERNLVDTRYASRVVLNALQEHFRAHKIDTKVSVVRGQFTSQLRRHWGIEKTRDTYHHHAVDALIIAA
SSQLNLWKKQKNTLVSYSEDQLLDIETGELISDDEYKESVFKAPYQHFVDTLKSKEFEDSILFSYQVDSKFNRKISDATIYAT
RQAKVGKDKADETYVLGKIKDIYTQDGYDAFMKIYKKDKSKFLMYRHDPQTFEKVIEPILENYPNKQINEKGKEVPCNPFLKY
KEEHGYIRKYSKKGNGPEIKSLKYYDSKLGNHIDITPKDSNNKVVLQSVSPWRADVYFNKTTGKYEILGLKYADLQFEKGTGT
YKISQEKYNDIKKKEGVDSDSEFKFTLYKNDLLLVKDTETKEQQLFRFLSRTMPKQKHYVELKPYDKQKFEGGEALIKVLGNV
ANSGQCKKGLGKSNISIYKVRTDVLGNQHIIKNEGDKPKLDF
SEQ ID NO: 49
MNAEHGKEGLLIMEENFQYRIGLDIGITSVGWAVLQNNSQDEPVRITDLGVRIFDVAENPKNGDALAAPRRDARTTRRRLRRR
RHRLERIKFLLQENGLIEMDSFMERYYKGNLPDVYQLRYEGLDRKLKDEELAQVLIHIAKHRGFRSTRKAETKEKEGGAVLKA
TTENQKIMQEKGYRTVGEMLYLDEAFHTECLWNEKGYVLTPRNRPDDYKHTILRSMLVEEVHAIFAAQRAHGNQKATEGLEEA
YVEIMTSQRSFDMGPGLQPDGKPSPYAMEGFGDRVGKCTFEKDEYRAPKATYTAELFVALQKINHTKLIDEFGTGRFFSEEER
KTIIGLLLSSKELKYGTIRKKLNIDPSLKFNSLNYSAKKEGETEEERVLDTEKAKFASMFWTYEYSKCLKDRTEEMPVGEKAD
LFDRIGEILTAYKNDDSRSSRLKELGLSGEEIDGLLDLSPAKYQRVSLKAMRKMQPYLEDGLIYDKACEAAGYDFRALNDGNK
KHLLKGEEINAIVNDITNPVVKRSVSQTIKVINAIIQKYGSPQAVNIELAREMSKNFQDRTNLEKEMKKRQQENERAKQQIIE
LGKQNPTGQDILKYRLWNDQGGYCLYSGKKIPLEELFDGGYDIDHILPYSITFDDSYRNKVLVTAQENRQKGNRTPYEYFGAD
EKRWEDYEASVRLLVRDYKKQQKLLKKNFTEEERKEFKERNLNDTKYITRVVYNMIRQNLELEPFNHPEKKKQVWAVNGAVTS
YLRKRWGLMQKDRSTDRHHAMDAVVIACCTDGMIHKISRYMQGRELAYSRNFKFPDEETGEILNRDNFTREQWDEKFGVKVPL
PWNSFRDELDIRLLNEDPKNFLLTHADVQRELDYPGWMYGEEESPIEEGRYINYIRPLFVSRMPNHKVTGSAHDATIRSARDY
ETRGVVITKVPLTDLKLNKDNEIEGYYDKDSDRLLYQALVRQLLLHGNDGKKAFAEDFHKPKADGTEGPVVRKVKIEKKQTSG
VMVRGGTGIAANGEMVRIDVFRENGKYYFVPVYTADVVRKVLPNRAATHTKPYSEWRVMDDANFVFSLYSRDLIHVKSKKDIK
TNLVNGGLLLQKEIFAYYTGADIATASIAGFANDSNFKFRGLGIQSLEIFEKCQVDILGNISVVRHENRQEFH
SEQ ID NO: 50
MRVLGLDAGIASLGWALIEIEESNRGELSQGTIIGAGTWMFDAPEEKTQAGAKLKSEQRRTFRGQRRVVRRRRQRMNEVRRIL
HSHGLLPSSDRDALKQPGLDPWRIRAEALDRLLGPVELAVALGHIARHRGFKSNSKGAKTNDPADDTSKMKRAVNETREKLAR
FGSAAKMLVEDESFVLRQTPTKNGASEIVRRFRNREGDYSRSLLRDDLAAEMRALFTAQARFQSAIATADLQTAFTKAAFFQR
PLQDSEKLVGPCPFEVDEKRAPKRGYSFELFRFLSRLNHVTLRDGKQERTLTRDELALAAADFGAAAKVSFTALRKKLKLPET
TVFVGVKADEESKLDVVARSGKAAEGTARLRSVIVDALGELAWGALLCSPEKLDKIAEVISFRSDIGRISEGLAQAGCNAPLV
DALTAAASDGRFDPFTGAGHISSKAARNILSGLRQGMTYDKACCAADYDHTASRERGAFDVGGHGREALKRILQEERISRELV
GSPTARKALIESIKQVKAIVERYGVPDRIHVELARDVGKSIEEREEITRGIEKRNRQKDKLRGLFEKEVGRPPQDGARGKEEL
LRFELWSEQMGRCLYTDDYISPSQLVATDDAVQVDHILPWSRFADDSYANKTLCMAKANQDKKGRTPYEWFKAEKTDTEWDAF
IVRVEALADMKGFKKRNYKLRNAEEAAAKFRNRNLNDTRWACRLLAEALKQLYPKGEKDKDGKERRRVFSRPGALTDRLRRAW
GLQWMKKSTKGDRIPDDRHHALDAIVIAATTESLLQRATREVQEIEDKGLHYDLVKNVTPPWPGFREQAVEAVEKVFVARAER
RRARGKAHDATIRHIAVREGEQRVYERRKVAELKLADLDRVKDAERNARLIEKLRNWIEAGSPKDDPPLSPKGDPIFKVRLVT
KSKVNIALDTGNPKRPGTVDRGEMARVDVFRKASKKGKYEYYLVPIYPHDIATMKTPPIRAVQAYKPEDEWPEMDSSYEFCWS
LVPMTYLQVISSKGEIFEGYYRGMNRSVGAIQLSAHSNSSDVVQGIGARTLTEFKKFNVDRFGRKHEVERELRTWRGETWRGK
AYI
SEQ ID NO: 51
MGNYYLGLDVGIGSIGWAVINIEKKRIEDFNVRIFKSGEIQEKNRNSRASQQCRRSRGLRRLYRRKSHRKLRLKNYLSIIGLT
TSEKIDYYYETADNNVIQLRNKGLSEKLTPEEIAACLIHICNNRGYKDFYEVNVEDIEDPDERNEYKEEHDSIVLISNLMNEG
GYCTPAEMICNCREFDEPNSVYRKFHNSAASKNHYLITRHMLVKEVDLILENQSKYYGILDDKTIAKIKDIIFAQRDFEIGPG
KNERFRRFTGYLDSIGKCQFFKDQERGSRFTVIADIYAFVNVLSQYTYTNNRGESVFDTSFANDLINSALKNGSMDKRELKAI
AKSYHIDISDKNSDTSLTKCFKYIKVVKPLFEKYGYDWDKLIENYTDTDNNVLNRIGIVLSQAQTPKRRREKLKALNIGLDDG
LINELTKLKLSGTANVSYKYMQGSIEAFCEGDLYGKYQAKFNKEIPDIDENAKPQKLPPFKNEDDCEFFKNPVVFRSINETRK
LINAIIDKYGYPAAVNIETADELNKTFEDRAIDTKRNNDNQKENDRIVKEIIECIKCDEVHARHLIEKYKLWEAQEGKCLYSG
ETITKEDMLRDKDKLFEVDHIVPYSLILDNTINNKALVYAEENQKKGQRTPLMYMNEAQAADYRVRVNTMFKSKKCSKKKYQY
LMLPDLNDQELLGGWRSRNLNDTRYICKYLVNYLRKNLRFDRSYESSDEDDLKIRDHYRVFPVKSRFTSMFRRWWLNEKTWGR
YDKAELKKLTYLDHAADAIIIANCRPEYVVLAGEKLKLNKMYHQAGKRITPEYEQSKKACIDNLYKLFRMDRRTAEKLLSGHG
RLTPIIPNLSEEVDKRLWDKNIYEQFWKDDKDKKSCEELYRENVASLYKGDPKFASSLSMPVISLKPDHKYRGTITGEEAIRV
KEIDGKLIKLKRKSISEITAESINSIYTDDKILIDSLKTIFEQADYKDVGDYLKKTNQHFFTTSSGKRVNKVTVIEKVPSRWL
RKEIDDNNFSLLNDSSYYCIELYKDSKGDNNLQGIAMSDIVHDRKTKKLYLKPDFNYPDDYYTHVMYIFPGDYLRIKSTSKKS
GEQLKFEGYFISVKNVNENSFRFISDNKPCAKDKRVSITKKDIVIKLAVDLMGKVQGENNGKGISCGEPLSLLKEKN
SEQ ID NO: 52
MLSRQLLGASHLARPVSYSYNVQDNDVHCSYGERCFMRGKRYRIGIDVGLNSVGLAAVEVSDENSPVRLLNAQSVIHDGGVDP
QKNKEAITRKNMSGVARRTRRMRRRKRERLHKLDMLLGKFGYPVIEPESLDKPFEEWHVRAELATRYIEDDELRRESISIALR
HMARHRGWRNPYRQVDSLISDNPYSKQYGELKEKAKAYNDDATAAEEESTPAQLVVAMLDAGYAEAPRLRWRTGSKKPDAEGY
LPVRLMQEDNANELKQIFRVQRVPADEWKPLFRSVFYAVSPKGSAEQRVGQDPLAPEQARALKASLAFQEYRIANVITNLRIK
DASAELRKLTVDEKQSIYDQLVSPSSEDITWSDLCDFLGFKRSQLKGVGSLTEDGEERISSRPPRLTSVQRIYESDNKIRKPL
VAWWKSASDNEHEAMIRLLSNTVDIDKVREDVAYASAIEFIDGLDDDALTKLDSVDLPSGRAAYSVETLQKLTRQMLTTDDDL
HEARKTLFNVTDSWRPPADPIGEPLGNPSVDRVLKNVNRYLMNCQQRWGNPVSVNIEHVRSSFSSVAFARKDKREYEKNNEKR
SIFRSSLSEQLRADEQMEKVRESDLRRLEAIQRQNGQCLYCGRTITFRTCEMDHIVPRKGVGSTNTRTNFAAVCAECNRMKSN
TPFAIWARSEDAQTRGVSLAEAKKRVTMFTFNPKSYAPREVKAFKQAVIARLQQTEDDAAIDNRSIESVAWMADELHRRIDWY
FNAKQYVNSASIDDAEAETMKTTVSVFQGRVTASARRAAGIEGKIHFIGQQSKTRLDRRHHAVDASVIAMMNTAAAQTLMERE
SLRESQRLIGLMPGERSWKEYPYEGTSRYESFHLWLDNMDVLLELLNDALDNDRIAVMQSQRYVLGNSIAHDATIHPLEKVPL
GSAMSADLIRRASTPALWCALTRLPDYDEKEGLPEDSHREIRVHDTRYSADDEMGFFASQAAQIAVQEGSADIGSAIHHARVY
RCWKTNAKGVRKYFYGMIRVFQTDLLRACHDDLFTVPLPPQSISMRYGEPRVVQALQSGNAQYLGSLVVGDEIEMDFSSLDVD
GQIGEYLQFFSQFSGGNLAWKHWVVDGFFNQTQLRIRPRYLAAEGLAKAFSDDVVPDGVQKIVTKQGWLPPVNTASKTAVRIV
RRNAFGEPRLSSAHHMPCSWQWRHE
SEQ ID NO: 53
MYSIGLDLGISSVGWSVIDERTGNVIDLGVRLFSAKNSEKNLERRTNRGGRRLIRRKTNRLKDAKKILAAVGFYEDKSLKNSC
PYQLRVKGLTEPLSRGEIYKVTLHILKKRGISYLDEVDTEAAKESQDYKEQVRKNAQLLTKYTPGQIQLQRLKENNRVKTGIN
AQGNYQLNVFKVSAYANELATILKTQQAFYPNELTDDWIALFVQPGIAEEAGLIYRKRPYYHGPGNEANNSPYGRWSDFQKTG
EPATNIFDKLIGKDFQGELRASGLSLSAQQYNLLNDLTNLKIDGEVPLSSEQKEYILTELMTKEFTRFGVNDVVKLLGVKKER
LSGWRLDKKGKPEIHTLKGYRNWRKIFAEAGIDLATLPTETIDCLAKVLTLNTEREGIENTLAFELPELSESVKLLVLDRYKE
LSQSISTQSWHRFSLKTLHLLIPELMNATSEQNTLLEQFQLKSDVRKRYSEYKKLPTKDVLAEIYNPTVNKTVSQAFKVIDAL
LVKYGKEQIRYITIEMPRDDNEEDEKKRIKELHAKNSQRKNDSQSYFMQKSGWSQEKFQTTIQKNRRFLAKLLYYYEQDGICA
YTGLPISPELLVSDSTEIDHIIPISISLDDSINNKVLVLSKANQVKGQQTPYDAWMDGSFKKINGKFSNWDDYQKWVESRHFS
HKKENNLLETRNIFDSEQVEKFLARNLNDTRYASRLVLNTLQSFFTNQETKVRVVNGSFTHTLRKKWGADLDKTRETHHHHAV
DATLCAVTSFVKVSRYHYAVKEETGEKVMREIDFETGEIVNEMSYWEFKKSKKYERKTYQVKWPNFREQLKPVNLHPRIKFSH
QVDRKANRKLSDATIYSVREKTEVKTLKSGKQKITTDEYTIGKIKDIYTLDGWEAFKKKQDKLLMKDLDEKTYERLLSIAETT
PDFQEVEEKNGKVKRVKRSPFAVYCEENDIPAIQKYAKKNNGPLIRSLKYYDGKLNKHINITKDSQGRPVEKTKNGRKVTLQS
LKPYRYDIYQDLETKAYYTVQLYYSDLRFVEGKYGITEKEYMKKVAEQTKGQVVRFCFSLQKNDGLEIEWKDSQRYDVRFYNF
QSANSINFKGLEQEMMPAENQFKQKPYNNGAINLNIAKYGKEGKKLRKFNTDILGKKHYLFYEKEPKNIIK
SEQ ID NO: 54
MYFYKNKENKLNKKVVLGLDLGIASVGWCLTDISQKEDNKFPIILHGVRLFETVDDSDDKLLNETRRKKRGQRRRNRRLFTRK
RDFIKYLIDNNIIELEFDKNPKILVRNFIEKYINPFSKNLELKYKSVTNLPIGFHNLRKAAINEKYKLDKSELIVLLYFYLSL
RGAFFDNPEDTKSKEMNKNEIEIFDKNESIKNAEFPIDKIIEFYKISGKIRSTINLKFGHQDYLKEIKQVFEKQNIDFMNYEK
FAMEEKSFFSRIRNYSEGPGNEKSFSKYGLYANENGNPELIINEKGQKIYTKIFKTLWESKIGKCSYDKKLYRAPKNSFSAKV
FDITNKLTDWKHKNEYISERLKRKILLSRFLNKDSKSAVEKILKEENIKFENLSEIAYNKDDNKINLPIINAYHSLTTIFKKH
LINFENYLISNENDLSKLMSFYKQQSEKLFVPNEKGSYEINQNNNVLHIFDAISNILNKFSTIQDRIRILEGYFEFSNLKKDV
KSSEIYSEIAKLREFSGTSSLSFGAYYKFIPNLISEGSKNYSTISYEEKALQNQKNNFSHSNLFEKTWVEDLIASPTVKRSLR
QTMNLLKEIFKYSEKNNLEIEKIVVEVTRSSNNKHERKKIEGINKYRKEKYEELKKVYDLPNENTTLLKKLWLLRQQQGYDAY
SLRKIEANDVINKPWNYDIDHIVPRSISFDDSFSNLVIVNKLDNAKKSNDLSAKQFIEKIYGIEKLKEAKENWGNWYLRNANG
KAFNDKGKFIKLYTIDNLDEFDNSDFINRNLSDTSYITNALVNHLTFSNSKYKYSVVSVNGKQTSNLRNQIAFVGIKNNKETE
REWKRPEGFKSINSNDFLIREEGKNDVKDDVLIKDRSFNGHHAEDAYFITIISQYFRSFKRIERLNVNYRKETRELDDLEKNN
IKFKEKASFDNFLLINALDELNEKLNQMRFSRMVITKKNTQLFNETLYSGKYDKGKNTIKKVEKLNLLDNRTDKIKKIEEFFD
EDKLKENELTKLHIFNHDKNLYETLKIIWNEVKIEIKNKNLNEKNYFKYFVNKKLQEGKISFNEWVPILDNDFKIIRKIRYIK
FSSEEKETDEIIFSQSNFLKIDQRQNFSFHNTLYWVQIWVYKNQKDQYCFISIDARNSKFEKDEIKINYEKLKTQKEKLQIIN
EEPILKINKGDLFENEEKELFYIVGRDEKPQKLEIKYILGKKIKDQKQIQKPVKKYFPNWKKVNLTYMGEIFKK
SEQ ID NO: 55
MDNKNYRIGIDVGLNSIGFCAVEVDQHDTPLGFLNLSVYRHDAGIDPNGKKTNTTRLAMSGVARRTRRLFRKRKRRLAALDRF
IEAQGWTLPDHADYKDPYTPWLVRAELAQTPIRDENDLHEKLAIAVRHIARHRGWRSPWVPVRSLHVEQPPSDQYLALKERVE
AKTLLQMPEGATPAEMVVALDLSVDVNLRPKNREKTDTRPENKKPGFLGGKLMQSDNANELRKIAKIQGLDDALLRELIELVF
AADSPKGASGELVGYDVLPGQHGKRRAEKAHPAFQRYRIASIVSNLRIRHLGSGADERLDVETQKRVFEYLLNAKPTADITWS
DVAEEIGVERNLLMGTATQTADGERASAKPPVDVTNVAFATCKIKPLKEWWLNADYEARCVMVSALSHAEKLTEGTAAEVEVA
EFLQNLSDEDNEKLDSFSLPIGRAAYSVDSLERLTKRMIENGEDLFEARVNEFGVSEDWRPPAEPIGARVGNPAVDRVLKAVN
RYLMAAEAEWGAPLSVNIEHVREGFISKRQAVEIDRENQKRYQRNQAVRSQIADHINATSGVRGSDVTRYLAIQRQNGECLYC
GTAITFVNSEMDHIVPRAGLGSTNTRDNLVATCERCNKSKSNKPFAVWAAECGIPGVSVAEALKRVDFWIADGFASSKEHREL
QKGVKDRLKRKVSDPEIDNRSMESVAWMARELAHRVQYYFDEKHTGTKVRVFRGSLTSAARKASGFESRVNFIGGNGKTRLDR
RHHAMDAATVAMLRNSVAKTLVLRGNIRASERAIGAAETWKSFRGENVADRQIFESWSENMRVLVEKFNLALYNDEVSIFSSL
RLQLGNGKAHDDTITKLQMHKVGDAWSLTEIDRASTPALWCALTRQPDFTWKDGLPANEDRTIIVNGTHYGPLDKVGIFGKAA
ASLLVRGGSVDIGSAIHHARIYRIAGKKPTYGMVRVFAPDLLRYRNEDLFNVELPPQSVSMRYAEPKVREAINEGKAEYLGWL
VVGDELLLDLSSETSGQIAELQQDFPGTTHWTVAGFFSPSRLRLRPVYLAQEGLGEDVSEGSKSIIAGQGWRPAVNKVFGSAM
PEVIRRDGLGRKRRFSYSGLPVSWQG
SEQ ID NO: 56
MRLGLDIGTSSIGWWLYETDGAGSDARITGVVDGGVRIFSDGRDPKSGASLAVDRRAARAMRRRRDRYLRRRATLMKVLAETG
LMPADPAEAKALEALDPFALRAAGLDEPLPLPHLGRALFHLNQRRGFKSNRKTDRGDNESGKIKDATARLDMEMMANGARTYG
EFLHKRRQKATDPRHVPSVRTRLSIANRGGPDGKEEAGYDFYPDRRHLEEEFHKLWAAQGAHHPELTETLRDLLFEKIFFQRP
LKEPEVGLCLFSGHHGVPPKDPRLPKAHPLTQRRVLYETVNQLRVTADGREARPLTREERDQVIHALDNKKPTKSLSSMVLKL
PALAKVLKLRDGERFTLETGVRDAIACDPLRASPAHPDRFGPRWSILDADAQWEVISRIRRVQSDAEHAALVDWLTEAHGLDR
AHAEATAHAPLPDGYGRLGLTATTRILYQLTADVVTYADAVKACGWHHSDGRTGECFDRLPYYGEVLERHVIPGSYHPDDDDI
TRFGRITNPTVHIGLNQLRRLVNRIIETHGKPHQIVVELARDLKKSEEQKRADIKRIRDTTEAAKKRSEKLEELEIEDNGRNR
MLLRLWEDLNPDDAMRRFCPYTGTRISAAMIFDGSCDVDHILPYSRTLDDSFPNRTLCLREANRQKRNQTPWQAWGDTPHWHA
IAANLKNLPENKRWRFAPDAMTRFEGENGFLDRALKDTQYLARISRSYLDTLFTKGGHVWVVPGRFTEMLRRHWGLNSLLSDA
GRGAVKAKNRTDHRHHAIDAAVIAATDPGLLNRISRAAGQGEAAGQSAELIARDTPPPWEGFRDDLRVRLDRIIVSHRADHGR
IDHAARKQGRDSTAGQLHQETAYSIVDDIHVASRTDLLSLKPAQLLDEPGRSGQVRDPQLRKALRVATGGKTGKDFENALRYF
ASKPGPYQAIRRVRIIKPLQAQARVPVPAQDPIKAYQGGSNHLFEIWRLPDGEIEAQVITSFEAHTLEGEKRPHPAAKRLLRV
HKGDMVALERDGRRVVGHVQKMDIANGLFIVPHNEANADTRNNDKSDPFKWIQIGARPAIASGIRRVSVDEIGRLRDGGTRPI
SEQ ID NO: 57
MLHCIAVIRVPPSEEPGFFETHADSCALCHHGCMTYAANDKAIRYRVGIDVGLRSIGFCAVEVDDEDHPIRILNSVVHVHDAG
TGGPGETESLRKRSGVAARARRRGRAEKQRLKKLDVLLEELGWGVSSNELLDSHAPWHIRKRLVSEYIEDETERRQCLSVAMA
HIARHRGWRNSFSKVDTLLLEQAPSDRMQGLKERVEDRTGLQFSEEVTQGELVATLLEHDGDVTIRGFVRKGGKATKVHGVLE
GKYMQSDLVAELRQICRTQRVSETTFEKLVLSIFHSKEPAPSAARQRERVGLDELQLALDPAAKQPRAERAHPAFQKFKVVAT
LANMRIREQSAGERSLTSEELNRVARYLLNHTESESPTWDDVARKLEVPRHRLRGSSRASLETGGGLTYPPVDDTTVRVMSAE
VDWLADWWDCANDESRGHMIDAISNGCGSEPDDVEDEEVNELISSATAEDMLKLELLAKKLPSGRVAYSLKTLREVTAAILET
GDDLSQAITRLYGVDPGWVPTPAPIEAPVGNPSVDRVLKQVARWLKFASKRWGVPQTVNIEHTREGLKSASLLEEERERWERF
EARREIRQKEMYKRLGISGPFRRSDQVRYEILDLQDCACLYCGNEINFQTFEVDHIIPRVDASSDSRRTNLAAVCHSCNSAKG
GLAFGQWVKRGDCPSGVSLENAIKRVRSWSKDRLGLTEKAMGKRKSEVISRLKTEMPYEEFDGRSMESVAWMAIELKKRIEGY
FNSDRPEGCAAVQVNAYSGRLTACARRAAHVDKRVRLIRLKGDDGHHKNRFDRRNHAMDALVIALMTPAIARTIAVREDRREA
QQLTRAFESWKNFLGSEERMQDRWESWIGDVEYACDRLNELIDADKIPVTENLRLRNSGKLHADQPESLKKARRGSKRPRPQR
YVLGDALPADVINRVTDPGLWTALVRAPGFDSQLGLPADLNRGLKLRGKRISADFPIDYFPTDSPALAVQGGYVGLEFHHARL
YRIIGPKEKVKYALLRVCAIDLCGIDCDDLFEVELKPSSISMRTADAKLKEAMGNGSAKQIGWLVLGDEIQIDPTKFPKQSIG
KFLKECGPVSSWRVSALDTPSKITLKPRLLSNEPLLKTSRVGGHESDLVVAECVEKIMKKTGWVVEINALCQSGLIRVIRRNA
LGEVRTSPKSGLPISLNLR
SEQ ID NO: 58
MRYRVGLDLGTASVGAAVFSMDEQGNPMELIWHYERLFSEPLVPDMGQLKPKKAARRLARQQRRQIDRRASRLRRIAIVSRRL
GIAPGRNDSGVHGNDVPTLRAMAVNERIELGQLRAVLLRMGKKRGYGGTFKAVRKVGEAGEVASGASRLEEEMVALASVQNKD
SVTVGEYLAARVEHGLPSKLKVAANNEYYAPEYALFRQYLGLPAIKGRPDCLPNMYALRHQIEHEFERIWATQSQFHDVMKDH
GVKEEIRNAIFFQRPLKSPADKVGRCSLQTNLPRAPRAQIAAQNFRIEKQMADLRWGMGRRAEMLNDHQKAVIRELLNQQKEL
SFRKIYKELERAGCPGPEGKGLNMDRAALGGRDDLSGNTTLAAWRKLGLEDRWQELDEVTQIQVINFLADLGSPEQLDTDDWS
CRFMGKNGRPRNFSDEFVAFMNELRMTDGFDRLSKMGFEGGRSSYSIKALKALTEWMIAPHWRETPETHRVDEEAAIRECYPE
SLATPAQGGRQSKLEPPPLTGNEVVDVALRQVRHTINMMIDDLGSVPAQIVVEMAREMKGGVTRRNDIEKQNKRFASERKKAA
QSIEENGKTPTPARILRYQLWIEQGHQCPYCESNISLEQALSGAYTNFEHILPRTLTQIGRKRSELVLAHRECNDEKGNRTPY
QAFGHDDRRWRIVEQRANALPKKSSRKTRLLLLKDFEGEALTDESIDEFADRQLHESSWLAKVTTQWLSSLGSDVYVSRGSLT
AELRRRWGLDTVIPQVRFESGMPVVDEEGAEITPEEFEKFRLQWEGHRVTREMRTDRRPDKRIDHRHHLVDAIVTALTSRSLY
QQYAKAWKVADEKQRHGRVDVKVELPMPILTIRDIALEAVRSVRISHKPDRYPDGRFFEATAYGIAQRLDERSGEKVDWLVSR
KSLTDLAPEKKSIDVDKVRANISRIVGEAIRLHISNIFEKRVSKGMTPQQALREPIEFQGNILRKVRCFYSKADDCVRIEHSS
RRGHHYKMLLNDGFAYMEVPCKEGILYGVPNLVRPSEAVGIKRAPESGDFIRFYKGDTVKNIKTGRVYTIKQILGDGGGKLIL
TPVTETKPADLLSAKWGRLKVGGRNIHLLRLCAE
SEQ ID NO: 59
MIGEHVRGGCLFDDHWTPNWGAFRLPNTVRTFTKAENPKDGSSLAEPRRQARGLRRRLRRKTQRLEDLRRLLAKEGVLSLSDL
ETLFRETPAKDPYQLRAEGLDRPLSFPEWVRVLYHITKHRGFQSNRRNPVEDGQERSRQEEEGKLLSGVGENERLLREGGYRT
AGEMLARDPKFQDHRRNRAGDYSHTLSRSLLLEEARRLFQSQRTLGNPHASSNLEEAFLHLVAFQNPFASGEDIRNKAGHCSL
EPDQIRAPRRSASAETFMLLQKTGNLRLIHRRTGEERPLTDKEREQIHLLAWKQEKVIHKTLRRHLEIPEEWLFTGLPYHRSG
DKAEEKLFVHLAGIHEIRKALDKGPDPAVWDTLRSRRDLLDSIADTLTFYKNEDEILPRLESLGLSPENARALAPLSFSGTAH
LSLSALGKLLPHLEEGKSYTQARADAGYAAPPPDRHPKLPPLEEADWRNPVVFRALTQTRKVVNALVRRYGPPWCIHLETARE
LSQPAKVRRRIETEQQANEKKKQQAEREFLDIVGTAPGPGDLLKMRLWREQGGFCPYCEEYLNPTRLAEPGYAEMDHILPYSR
SLDNGWHNRVLVHGKDNRDKGNRTPFEAFGGDTARWDRLVAWVQASHLSAPKKRNLLREDFGEEAERELKDRNLTDTRFITKT
AATLLRDRLTFHPEAPKDPVMTLNGRLTAFLRKQWGLHKNRKNGDLHHALDAAVLAVASRSFVYRLSSHNAAWGELPRGREAE
NGFSLPYPAFRSEVLARLCPTREEILLRLDQGGVGYDEAFRNGLRPVFVSRAPSRRLRGKAHMETLRSPKWKDHPEGPRTASR
IPLKDLNLEKLERMVGKDRDRKLYEALRERLAAFGGNGKKAFVAPFRKPCRSGEGPLVRSLRIFDSGYSGVELRDGGEVYAVA
DHESMVRVDVYAKKNRFYLVPVYVADVARGIVKNRAIVAHKSEEEWDLVDGSFDFRFSLFPGDLVEIEKKDGAYLGYYKSCHR
GDGRLLLDRHDRMPRESDCGTFYVSTRKDVLSMSKYQVDPLGEIRLVGSEKPPFVL
SEQ ID NO: 60
MEKKRKVTLGFDLGIASVGWAIVDSETNQVYKLGSRLFDAPDTNLERRTQRGTRRLLRRRKYRNQKFYNLVKRTEVFGLSSRE
AIENRFRELSIKYPNIIELKTKALSQEVCPDEIAWILHDYLKNRGYFYDEKETKEDFDQQTVESMPSYKLNEFYKKYGYFKGA
LSQPTESEMKDNKDLKEAFFFDFSNKEWLKEINYFFNVQKNILSETFIEEFKKIFSFTRDISKGPGSDNMPSPYGIFGEFGDN
GQGGRYEHIWDKNIGKCSIFTNEQRAPKYLPSALIFNFLNELANIRLYSTDKKNIQPLWKLSSVDKLNILLNLFNLPISEKKK
KLTSTNINDIVKKESIKSIMISVEDIDMIKDEWAGKEPNVYGVGLSGLNIEESAKENKFKFQDLKILNVLINLLDNVGIKFEF
KDRNDIIKNLELLDNLYLFLIYQKESNNKDSSIDLFIAKNESLNIENLKLKLKEFLLGAGNEFENHNSKTHSLSKKAIDEILP
KLLDNNEGWNLEAIKNYDEEIKSQIEDNSSLMAKQDKKYLNDNFLKDAILPPNVKVTFQQAILIFNKIIQKFSKDFEIDKVVI
ELAREMTQDQENDALKGIAKAQKSKKSLVEERLEANNIDKSVFNDKYEKLIYKIFLWISQDFKDPYTGAQISVNEIVNNKVEI
DHIIPYSLCFDDSSANKVLVHKQSNQEKSNSLPYEYIKQGHSGWNWDEFTKYVKRVFVNNVDSILSKKERLKKSENLLTASYD
GYDKLGFLARNLNDTRYATILFRDQLNNYAEHHLIDNKKMFKVIAMNGAVTSFIRKNMSYDNKLRLKDRSDFSHHAYDAAIIA
LFSNKTKTLYNLIDPSLNGIISKRSEGYWVIEDRYTGEIKELKKEDWTSIKNNVQARKIAKEIEEYLIDLDDEVFFSRKTKRK
TNRQLYNETIYGIATKTDEDGITNYYKKEKFSILDDKDIYLRLLREREKFVINQSNPEVIDQIIEIIESYGKENNIPSRDEAI
NIKYTKNKINYNLYLKQYMRSLTKSLDQFSEEFINQMIANKTFVLYNPTKNTTRKIKFLRLVNDVKINDIRKNQVINKFNGKN
NEPKAFYENINSLGAIVFKNSANNFKTLSINTQIAIFGDKNWDIEDFKTYNMEKIEKYKEIYGIDKTYNFHSFIFPGTILLDK
QNKEFYYISSIQTVRDIIEIKFLNKIEFKDENKNQDTSKTPKRLMFGIKSIMNNYEQVDISPFGINKKIFE
SEQ ID NO: 61
MGYRIGLDVGITSTGYAVLKTDKNGLPYKILTLDSVIYPRAENPQTGASLAEPRRIKRGLRRRTRRTKFRKQRTQQLFIHSGL
LSKPEIEQILATPQAKYSVYELRVAGLDRRLTNSELFRVLYFFIGHRGFKSNRKAELNPENEADKKQMGQLLNSIEEIRKAIA
EKGYRTVGELYLKDPKYNDHKRNKGYIDGYLSTPNRQMLVDEIKQILDKQRELGNEKLTDEFYATYLLGDENRAGIFQAQRDF
DEGPGAGPYAGDQIKKMVGKDIFEPTEDRAAKATYTFQYFNLLQKMTSLNYQNTTGDTWHTLNGLDRQAIIDAVFAKAEKPTK
TYKPTDFGELRKLLKLPDDARFNLVNYGSLQTQKEIETVEKKTRFVDFKAYHDLVKVLPEEMWQSRQLLDHIGTALTLYSSDK
RRRRYFAEELNLPAELIEKLLPLNFSKFGHLSIKSMQNIIPYLEMGQVYSEATTNTGYDFRKKQISKDTIREEITNPVVRRAV
TKTIKIVEQIIRRYGKPDGINIELARELGRNFKERGDIQKRQDKNRQTNDKIAAELTELGIPVNGQNIIRYKLHKEQNGVDPY
TGDQIPFERAFSEGYEVDHIIPYSISWDDSYTNKVLTSAKCNREKGNRIPMVYLANNEQRLNALTNIADNIIRNSRKRQKLLK
QKLSDEELKDWKQRNINDTRFITRVLYNYFRQAIEFNPELEKKQRVLPLNGEVTSKIRSRWGFLKVREDGDLHHAIDATVIAA
ITPKFIQQVTKYSQHQEVKNNQALWHDAEIKDAEYAAEAQRMDADLFNKIFNGFPLPWPEFLDELLARISDNPVEMMKSRSWN
TYTPIEIAKLKPVFVVRLANHKISGPAHLDTIRSAKLFDEKGIVLSRVSITKLKINKKGQVATGDGIYDPENSNNGDKVVYSA
IRQALEAHNGSGELAFPDGYLEYVDHGTKKLVRKVRVAKKVSLPVRLKNKAAADNGSMVRIDVFNTGKKFVFVPIYIKDTVEQ
VLPNKAIARGKSLWYQITESDQFCFSLYPGDMVHIESKTGIKPKYSNKENNTSVVPIKNFYGYFDGADIATASILVRAHDSSY
TARSIGIAGLLKFEKYQVDYFGRYHKVHEKKRQLFVKRDE
SEQ ID NO: 62
MQKNINTKQNHIYIKQAQKIKEKLGDKPYRIGLDLGVGSIGFAIVSMEENDGNVLLPKEIIMVGSRIFKASAGAADRKLSRGQ
RNNHRHTRERMRYLWKVLAEQKLALPVPADLDRKENSSEGETSAKRFLGDVLQKDIYELRVKSLDERLSLQELGYVLYHIAGH
RGSSAIRTFENDSEEAQKENTENKKIAGNIKRLMAKKNYRTYGEYLYKEFFENKEKHKREKISNAANNHKFSPTRDLVIKEAE
AILKKQAGKDGFHKELTEEYIEKLTKAIGYESEKLIPESGFCPYLKDEKRLPASHKLNEERRLWETLNNARYSDPIVDIVTGE
ITGYYEKQFTKEQKQKLFDYLLTGSELTPAQTKKLLGLKNTNFEDIILQGRDKKAQKIKGYKLIKLESMPFWARLSEAQQDSF
LYDWNSCPDEKLLTEKLSNEYHLTEEEIDNAFNEIVLSSSYAPLGKSAMLIILEKIKNDLSYTEAVEEALKEGKLTKEKQAIK
DRLPYYGAVLQESTQKIIAKGFSPQFKDKGYKTPHTNKYELEYGRIANPVVHQTLNELRKLVNEIIDILGKKPCEIGLETARE
LKKSAEDRSKLSREQNDNESNRNRIYEIYIRPQQQVIITRRENPRNYILKFELLEEQKSQCPFCGGQISPNDIINNQADIEHL
FPIAESEDNGRNNLVISHSACNADKAKRSPWAAFASAAKDSKYDYNRILSNVKENIPHKAWRFNQGAFEKFIENKPMAARFKT
DNSYISKVAHKYLACLFEKPNIICVKGSLTAQLRMAWGLQGLMIPFAKQLITEKESESFNKDVNSNKKIRLDNRHHALDAIVI
AYASRGYGNLLNKMAGKDYKINYSERNWLSKILLPPNNIVWENIDADLESFESSVKTALKNAFISVKHDHSDNGELVKGTMYK
IFYSERGYTLTTYKKLSALKLTDPQKKKTPKDFLETALLKFKGRESEMKNEKIKSAIENNKRLFDVIQDNLEKAKKLLEEENE
KSKAEGKKEKNINDASIYQKAISLSGDKYVQLSKKEPGKFFAISKPTPTTTGYGYDTGDSLCVDLYYDNKGKLCGEIIRKIDA
QQKNPLKYKEQGFTLFERIYGGDILEVDFDIHSDKNSFRNNTGSAPENRVFIKVGTFTEITNNNIQIWFGNIIKSTGGQDDSF
TINSMQQYNPRKLILSSCGFIKYRSPILKNKEG
SEQ ID NO: 63
MAAFKPNPINYILGLDIGIASVGWAMVEIDEDENPICLIDLGVRVFERAEVPKTGDSLAMARRLARSVRRLTRRRAHRLLRAR
RLLKREGVLQAADFDENGLIKSLPNTPWQLRAAALDRKLTPLEWSAVLLHLIKHRGYLSQRKNEGETADKELGALLKGVADNA
HALQTGDFRTPAELALNKFEKESGHIRNQRGDYSHTFSRKDLQAELILLFEKQKEFGNPHVSGGLKEGIETLLMTQRPALSGD
AVQKMLGHCTFEPAEPKAAKNTYTAERFIWLTKLNNLRILEQGSERPLTDTERATLMDEPYRKSKLTYAQARKLLGLEDTAFF
KGLRYGKDNAEASTLMEMKAYHAISRALEKEGLKDKKSPLNLSPELQDEIGTAFSLFKTDEDITGRLKDRIQPEILEALLKHI
SFDKFVQISLKALRRIVPLMEQGKRYDEACAEIYGDHYGKKNTEEKIYLPPIFADEIRNPVVLRALSQARKVINGVVRRYGSP
ARIHIETAREVGKSFKDRKEIEKRQEENRKDREKAAAKFREYFPNFVGEPKSKDILKLRLYEQQHGKCLYSGKEINLGRLNEK
GYVEIDHALPFSRTWDDSFNNKVLVLGSENQNKGNQTPYEYFNGKDNSREWQEFKARVETSRFPRSKKQRILLQKFDEDGFKE
RNLNDTRYVNRFLCQFVADRMRLTGKGKKRVFASNGQITNLLRGFWGLRKVRAENDRHHALDAVVVACSTVAMQQKITRFVRY
KEMNAFDGKTIDKETGEVLHQKTHFPQPWEFFAQEVMIRVFGKPDGKPEFEEADTPEKLRTLLAEKLSSRPEAVHEYVTPLFV
SRAPNRKMSGQGHMETVKSAKRLDEGVSVLRVPLTQLKLKDLEKMVNREREPKLYEALKARLEAHKDDPAKAFAEPFYKYDKA
GNRTQQVKAVRVEQVQKTGVWVRNHNGIADNATMVRVDVFEKGDKYYLVPIYSWQVAKGILPDRAVVQGKDEEDWQLIDDSFN
FKFSLHPNDLVEVITKKARMFGYFASCHRGTGNINIRIHDLDHKIGKNGILEGIGVKTALSFQKYQIDELGKEIRPCRLKKRP
PVR
SEQ ID NO: 64
MQTTNLSYILGLDLGIASVGWAVVEINENEDPIGLIDVGVRIFERAEVPKTGESLALSRRLARSTRRLIRRRAHRLLLAKRFL
KREGILSTIDLEKGLPNQAWELRVAGLERRLSAIEWGAVLLHLIKHRGYLSKRKNESQTNNKELGALLSGVAQNHQLLQSDDY
RTPAELALKKFAKEEGHIRNQRGAYTHTFNRLDLLAELNLLFAQQHQFGNPHCKEHIQQYMTELLMWQKPALSGEAILKMLGK
CTHEKNEFKAAKHTYSAERFVWLTKLNNLRILEDGAERALNEEERQLLINHPYEKSKLTYAQVRKLLGLSEQAIFKHLRYSKE
NAESATFMELKAWHAIRKALENQGLKDTWQDLAKKPDLLDEIGTAFSLYKTDEDIQQYLTNKVPNSVINALLVSLNFDKFIEL
SLKSLRKILPLMEQGKRYDQACREIYGHHYGEANQKTSQLLPAIPAQEIRNPVVLRTLSQARKVINAIIRQYGSPARVHIETG
RELGKSFKERREIQKQQEDNRTKRESAVQKFKELFSDFSSEPKSKDILKFRLYEQQHGKCLYSGKEINIHRLNEKGYVEIDHA
LPFSRTWDDSFNNKVLVLASENQNKGNQTPYEWLQGKINSERWKNFVALVLGSQCSAAKKQRLLTQVIDDNKFIDRNLNDTRY
IARFLSNYIQENLLLVGKNKKNVFTPNGQITALLRSRWGLIKARENNNRHHALDAIVVACATPSMQQKITRFIRFKEVHPYKI
ENRYEMVDQESGEIISPHFPEPWAYFRQEVNIRVFDNHPDTVLKEMLPDRPQANHQFVQPLFVSRAPTRKMSGQGHMETIKSA
KRLAEGISVLRIPLTQLKPNLLENMVNKEREPALYAGLKARLAEFNQDPAKAFATPFYKQGGQQVKAIRVEQVQKSGVLVREN
NGVADNASIVRTDVFIKNNKFFLVPIYTWQVAKGILPNKAIVAHKNEDEWEEMDEGAKFKFSLFPNDLVELKTKKEYFFGYYI
GLDRATGNISLKEHDGEISKGKDGVYRVGVKLALSFEKYQVDELGKNRQICRPQQRQPVR
SEQ ID NO: 65
MGIRFAFDLGTNSIGWAVWRTGPGVFGEDTAASLDGSGVLIFKDGRNPKDGQSLATMRRVPRQSRKRRDRFVLRRRDLLAALR
KAGLFPVDVEEGRRLAATDPYHLRAKALDESLTPHEMGRVIFHLNQRRGFRSNRKADRQDREKGKIAEGSKRLAETLAATNCR
TLGEFLWSRHRGTPRTRSPTRIRMEGEGAKALYAFYPTREMVRAEFERLWTAQSRFAPDLLTPERHEEIAGILFRQRDLAPPK
IGCCTFEPSERRLPRALPSVEARGIYERLAHLRITTGPVSDRGLTRPERDVLASALLAGKSLTFKAVRKTLKILPHALVNFEE
AGEKGLDGALTAKLLSKPDHYGAAWHGLSFAEKDTFVGKLLDEADEERLIRRLVTENRLSEDAARRCASIPLADGYGRLGRTA
NTEILAALVEETDETGTVVTYAEAVRRAGERTGRNWHHSDERDGVILDRLPYYGEILQRHVVPGSGEPEEKNEAARWGRLANP
TVHIGLNQLRKVVNRLIAAHGRPDQIVVELARELKLNREQKERLDRENRKNREENERRTAILAEHGQRDTAENKIRLRLFEEQ
ARANAGIALCPYTGRAIGIAELFTSEVEIDHILPVSLTLDDSLANRVLCRREANREKRRQTPFQAFGATPAWNDIVARAAKLP
PNKRWRFDPAALERFEREGGFLGRQLNETKYLSRLAKIYLGKICDPDRVYVTPGTLTGLLRARWGLNSILSDSNFKNRSDHRH
HAVDAVVIGVLTRGMIQRIAHDAARAEDQDLDRVFRDVPVPFEDFRDHVRERVSTITVAVKPEHGKGGALHEDTSYGLVPDTD
PNAALGNLVVRKPIRSLTAGEVDRVRDRALRARLGALAAPFRDESGRVRDAKGLAQALEAFGAENGIRRVRILKPDASVVTIA
DRRTGVPYRAVAPGENHHVDIVQMRDGSWRGFAASVFEVNRPGWRPEWEVKKLGGKLVMRLHKGDMVELSDKDGQRRVKVVQQ
IEISANRVRLSPHNDGGKLQDRHADADDPFRWDLATIPLLKDRGCVAVRVDPIGVVTLRRSNV
SEQ ID NO: 66
MMEVFMGRLVLGLDIGITSVGFGIIDLDESEIVDYGVRLFKEGTAAENETRRTKRGGRRLKRRRVTRREDMLHLLKQAGIIST
SFHPLNNPYDVRVKGLNERLNGEELATALLHLCKHRGSSVETIEDDEAKAKEAGETKKVLSMNDQLLKSGKYVCEIQKERLRT
NGHIRGHENNFKTRAYVDEAFQILSHQDLSNELKSAIITIISRKRMYYDGPGGPLSPTPYGRYTYFGQKEPIDLIEKMRGKCS
LFPNEPRAPKLAYSAELFNLLNDLNNLSIEGEKLTSEQKAMILKIVHEKGKITPKQLAKEVGVSLEQIRGFRIDTKGSPLLSE
LTGYKMIREVLEKSNDEHLEDHVFYDEIAEILTKTKDIEGRKKQISELSSDLNEESVHQLAGLTKFTAYHSLSFKALRLINEE
MLKTELNQMQSITLFGLKQNNELSVKGMKNIQADDTAILSPVAKRAQRETFKVVNRLREIYGEFDSIVVEMAREKNSEEQRKA
IRERQKFFEMRNKQVADIIGDDRKINAKLREKLVLYQEQDGKTAYSLEPIDLKLLIDDPNAYEVDHIIPISISLDDSITNKVL
VTHRENQEKGNLTPISAFVKGRFTKGSLAQYKAYCLKLKEKNIKTNKGYRKKVEQYLLNENDIYKYDIQKEFINRNLVDTSYA
SRVVLNTLTTYFKQNEIPTKVFTVKGSLTNAFRRKINLKKDRDEDYGHHAIDALIIASMPKMRLLSTIFSRYKIEDIYDESTG
EVFSSGDDSMYYDDRYFAFIASLKAIKVRKFSHKIDTKPNRSVADETIYSTRVIDGKEKVVKKYKDIYDPKFTALAEDILNNA
YQEKYLMALHDPQTFDQIVKVVNYYFEEMSKSEKYFTKDKKGRIKISGMNPLSLYRDEHGMLKKYSKKGDGPAITQMKYFDGV
LGNHIDISAHYQVRDKKVVLQQISPYRTDFYYSKENGYKFVTIRYKDVRWSEKKKKYVIDQQDYAMKKAEKKIDDTYEFQFSM
HRDELIGITKAEGEALIYPDETWHNFNFFFHAGETPEILKFTATNNDKSNKIEVKPIHCYCKMRLMPTISKKIVRIDKYATDV
VGNLYKVKKNTLKFEFD
SEQ ID NO: 67
MKKILGVDLGITSFGYAILQETGKDLYRCLDNSVVMRNNPYDEKSGESSQSIRSTQKSMRRLIEKRKKRIRCVAQTMERYGIL
DYSETMKINDPKNNPIKNRWQLRAVDAWKRPLSPQELFAIFAHMAKHRGYKSIATEDLIYELELELGLNDPEKESEKKADERR
QVYNALRHLEELRKKYGGETIAQTIHRAVEAGDLRSYRNHDDYEKMIRREDIEEEIEKVLLRQAELGALGLPEEQVSELIDEL
KACITDQEMPTIDESLFGKCTFYKDELAAPAYSYLYDLYRLYKKLADLNIDGYEVTQEDREKVIEWVEKKIAQGKNLKKITHK
DLRKILGLAPEQKIFGVEDERIVKGKKEPRTFVPFFFLADIAKFKELFASIQKHPDALQIFRELAEILQRSKTPQEALDRLRA
LMAGKGIDTDDRELLELFKNKRSGTRELSHRYILEALPLFLEGYDEKEVQRILGFDDREDYSRYPKSLRHLHLREGNLFEKEE
NPINNHAVKSLASWALGLIADLSWRYGPFDEIILETTRDALPEKIRKEIDKAMREREKALDKIIGKYKKEFPSIDKRLARKIQ
LWERQKGLDLYSGKVINLSQLLDGSADIEHIVPQSLGGLSTDYNTIVTLKSVNAAKGNRLPGDWLAGNPDYRERIGMLSEKGL
IDWKKRKNLLAQSLDEIYTENTHSKGIRATSYLEALVAQVLKRYYPFPDPELRKNGIGVRMIPGKVTSKTRSLLGIKSKSRET
NFHHAEDALILSTLTRGWQNRLHRMLRDNYGKSEAELKELWKKYMPHIEGLTLADYIDEAFRRFMSKGEESLFYRDMFDTIRS
ISYWVDKKPLSASSHKETVYSSRHEVPTLRKNILEAFDSLNVIKDRHKLTTEEFMKRYDKEIRQKLWLHRIGNTNDESYRAVE
ERATQIAQILTRYQLMDAQNDKEIDEKFQQALKELITSPIEVTGKLLRKMRFVYDKLNAMQIDRGLVETDKNMLGIHISKGPN
EKLIFRRMDVNNAHELQKERSGILCYLNEMLFIFNKKGLIHYGCLRSYLEKGQGSKYIALFNPRFPANPKAQPSKFTSDSKIK
QVGIGSATGIIKAHLDLDGHVRSYEVFGTLPEGSIEWFKEESGYGRVEDDPHH
SEQ ID NO: 68
MRPIEPWILGLDIGTDSLGWAVFSCEEKGPPTAKELLGGGVRLFDSGRDAKDHTSRQAERGAFRRARRQTRTWPWRRDRLIAL
FQAAGLTPPAAETRQIALALRREAVSRPLAPDALWAALLHLAHHRGFRSNRIDKRERAAAKALAKAKPAKATAKATAPAKEAD
DEAGFWEGAEAALRQRMAASGAPTVGALLADDLDRGQPVRMRYNQSDRDGVVAPTRALIAEELAEIVARQSSAYPGLDWPAVT
RLVLDQRPLRSKGAGPCAFLPGEDRALRALPTVQDFIIRQTLANLRLPSTSADEPRPLTDEEHAKALALLSTARFVEWPALRR
ALGLKRGVKFTAETERNGAKQAARGTAGNLTEAILAPLIPGWSGWDLDRKDRVFSDLWAARQDRSALLALIGDPRGPTRVTED
ETAEAVADAIQIVLPTGRASLSAKAARAIAQAMAPGIGYDEAVTLALGLHHSHRPRQERLARLPYYAAALPDVGLDGDPVGPP
PAEDDGAAAEAYYGRIGNISVHIALNETRKIVNALLHRHGPILRLVMVETTRELKAGADERKRMIAEQAERERENAEIDVELR
KSDRWMANARERRQRVRLARRQNNLCPYTSTPIGHADLLGDAYDIDHVIPLARGGRDSLDNMVLCQSDANKTKGDKTPWEAFH
DKPGWIAQRDDFLARLDPQTAKALAWRFADDAGERVARKSAEDEDQGFLPRQLTDTGYIARVALRYLSLVTNEPNAVVATNGR
LTGLLRLAWDITPGPAPRDLLPTPRDALRDDTAARRFLDGLTPPPLAKAVEGAVQARLAALGRSRVADAGLADALGLTLASLG
GGGKNRADHRHHFIDAAMIAVTTRGLINQINQASGAGRILDLRKWPRTNFEPPYPTFRAEVMKQWDHIHPSIRPAHRDGGSLH
AATVFGVRNRPDARVLVQRKPVEKLFLDANAKPLPADKIAEIIDGFASPRMAKRFKALLARYQAAHPEVPPALAALAVARDPA
FGPRGMTANTVIAGRSDGDGEDAGLITPFRANPKAAVRTMGNAVYEVWEIQVKGRPRWTHRVLTRFDRTQPAPPPPPENARLV
MRLRRGDLVYWPLESGDRLFLVKKMAVDGRLALWPARLATGKATALYAQLSCPNINLNGDQGYCVQSAEGIRKEKIRTTSCTA
LGRLRLSKKAT
SEQ ID NO: 69
MKYTLGLDVGIASVGWAVIDKDNNKIIDLGVRCFDKAEESKTGESLATARRIARGMRRRISRRSQRLRLVKKLFVQYEIIKDS
SEFNRIFDTSRDGWKDPWELRYNALSRILKPYELVQVLTHITKRRGFKSNRKEDLSTTKEGVVITSIKNNSEMLRTKNYRTIG
EMIFMETPENSNKRNKVDEYIHTIAREDLLNEIKYIFSIQRKLGSPFVTEKLEHDFLNIWEFQRPFASGDSILSKVGKCTLLK
EELRAPTSCYTSEYFGLLQSINNLVLVEDNNTLTLNNDQRAKIIEYAHFKNEIKYSEIRKLLDIEPEILFKAHNLTHKNPSGN
NESKKFYEMKSYHKLKSTLPTDIWGKLHSNKESLDNLFYCLTVYKNDNEIKDYLQANNLDYLIEYIAKLPTFNKFKHLSLVAM
KRIIPFMEKGYKYSDACNMAELDFTGSSKLEKCNKLTVEPIIENVTNPVVIRALTQARKVINAIIQKYGLPYMVNIELAREAG
MTRQDRDNLKKEHENNRKAREKISDLIRQNGRVASGLDILKWRLWEDQGGRCAYSGKPIPVCDLLNDSLTQIDHIYPYSRSMD
DSYMNKVLVLTDENQNKRSYTPYEVWGSTEKWEDFEARIYSMHLPQSKEKRLLNRNFITKDLDSFISRNLNDTRYISRFLKNY
IESYLQFSNDSPKSCVVCVNGQCTAQLRSRWGLNKNREESDLHHALDAAVIACADRKIIKEITNYYNERENHNYKVKYPLPWH
SFRQDLMETLAGVFISRAPRRKITGPAHDETIRSPKHFNKGLTSVKIPLTTVTLEKLETMVKNTKGGISDKAVYNVLKNRLIE
HNNKPLKAFAEKIYKPLKNGTNGAIIRSIRVETPSYTGVFRNEGKGISDNSLMVRVDVFKKKDKYYLVPIYVAHMIKKELPSK
AIVPLKPESQWELIDSTHEFLFSLYQNDYLVIKTKKGITEGYYRSCHRGTGSLSLMPHFANNKNVKIDIGVRTAISIEKYNVD
ILGNKSIVKGEPRRGMEKYNSFKSN
SEQ ID NO: 70
MIRTLGIDIGIASIGWAVIEGEYTDKGLENKEIVASGVRVFTKAENPKNKESLALPRTLARSARRRNARKKGRIQQVKHYLSK
ALGLDLECFVQGEKLATLFQTSKDFLSPWELRERALYRVLDKEELARVILHIAKRRGYDDITYGVEDNDSGKIKKAIAENSKR
IKEEQCKTIGEMMYKLYFQKSLNVRNKKESYNRCVGRSELREELKTIFQIQQELKSPWVNEELIYKLLGNPDAQSKQEREGLI
FYQRPLKGFGDKIGKCSHIKKGENSPYRACKHAPSAEEFVALTKSINFLKNLTNRHGLCFSQEDMCVYLGKILQEAQKNEKGL
TYSKLKLLLDLPSDFEFLGLDYSGKNPEKAVFLSLPSTFKLNKITQDRKTQDKIANILGANKDWEAILKELESLQLSKEQIQT
IKDAKLNFSKHINLSLEALYHLLPLMNEGKRYDEGVEILQERGIFSKPQPKNRQLLPPLSELAKEESYFDIPNPVLRRALSEF
RKVVNALLEKYGGFHYFHIELTRDVCKAKSARMQLEKINKKNKSENDAASQLLEVLGLPNTYNNRLKCKLWKQQEEYCLYSGE
KITIDHLKDQRALQIDHAFPLSRSLDDSQSNKVLCLTSSNQEKSNKTPYEWLGSDEKKWDMYVGRVYSSNFSPSKKRKLTQKN
FKERNEEDFLARNLVDTGYIGRVTKEYIKHSLSFLPLPDGKKEHIRIISGSMTSTMRSFWGVQEKNRDHHLHHAQDAIIIACI
EPSMIQKYTTYLKDKETHRLKSHQKAQILREGDHKLSLRWPMSNFKDKIQESIQNIIPSHHVSHKVTGELHQETVRTKEFYYQ
AFGGEEGVKKALKFGKIREINQGIVDNGAMVRVDIFKSKDKGKFYAVPIYTYDFAIGKLPNKAIVQGKKNGIIKDWLEMDENY
EFCFSLFKNDCIKIQTKEMQEAVLAIYKSTNSAKATIELEHLSKYALKNEDEEKMFTDTDKEKNKTMTRESCGIQGLKVFQKV
KLSVLGEVLEHKPRNRQNIALKTTPKHV
SEQ ID NO: 71
MKYSIGLDIGIASVGWSVINKDKERIEDMGVRIFQKAENPKDGSSLASSRREKRGSRRRNRRKKHRLDRIKNILCESGLVKKN
EIEKIYKNAYLKSPWELRAKSLEAKISNKEIAQILLHIAKRRGFKSFRKTDRNADDTGKLLSGIQENKKIMEEKGYLTIGDMV
AKDPKFNTHVRNKAGSYLFSFSRKLLEDEVRKIQAKQKELGNTHFTDDVLEKYIEVFNSQRNFDEGPSKPSPYYSEIGQIAKM
IGNCTFESSEKRTAKNTWSGERFVFLQKLNNFRIVGLSGKRPLTEEERDIVEKEVYLKKEVRYEKLRKILYLKEEERFGDLNY
SKDEKQDKKTEKTKFISLIGNYTIKKLNLSEKLKSEIEEDKSKLDKIIEILTFNKSDKTIESNLKKLELSREDIEILLSEEFS
GTLNLSLKAIKKILPYLEKGLSYNEACEKADYDYKNNGIKFKRGELLPVVDKDLIANPVVLRAISQTRKVVNAIIRKYGTPHT
IHVEVARDLAKSYDDRQTIIKENKKRELENEKTKKFISEEFGIKNVKGKLLLKYRLYQEQEGRCAYSRKELSLSEVILDESMT
DIDHIIPYSRSMDDSYSNKVLVLSGENRKKSNLLPKEYFDRQGRDWDTFVLNVKAMKIHPRKKSNLLKEKFTREDNKDWKSRA
LNDTRYISRFVANYLENALEYRDDSPKKRVFMIPGQLTAQLRARWRLNKVRENGDLHHALDAAVVAVTDQKAINNISNISRYK
ELKNCKDVIPSIEYHADEETGEVYFEEVKDTRFPMPWSGFDLELQKRLESENPREEFYNLLSDKRYLGWFNYEEGFIEKLRPV
FVSRMPNRGVKGQAHQETIRSSKKISNQIAVSKKPLNSIKLKDLEKMQGRDTDRKLYEALKNRLEEYDDKPEKAFAEPFYKPT
NSGKRGPLVRGIKVEEKQNVGVYVNGGQASNGSMVRIDVFRKNGKFYTVPIYVHQTLLKELPNRAINGKPYKDWDLIDGSFEF
LYSFYPNDLIEIEFGKSKSIKNDNKLTKTEIPEVNLSEVLGYYRGMDTSTGAATIDTQDGKIQMRIGIKTVKNIKKYQVDVLG
NVYKVKREKRQTF
SEQ ID NO: 72
MSKKVSRRYEEQAQEICQRLGSRPYSIGLDLGVGSIGVAVAAYDPIKKQPSDLVFVSSRIFIPSTGAAERRQKRGQRNSLRHR
ANRLKFLWKLLAERNLMLSYSEQDVPDPARLRFEDAVVRANPYELRLKGLNEQLTLSELGYALYHIANHRGSSSVRTFLDEEK
SSDDKKLEEQQAMTEQLAKEKGISTFIEVLTAFNTNGLIGYRNSESVKSKGVPVPTRDIISNEIDVLLQTQKQFYQEILSDEY
CDRIVSAILFENEKIVPEAGCCPYFPDEKKLPRCHFLNEERRLWEAINNARIKMPMQEGAAKRYQSASFSDEQRHILFHIARS
GTDITPKLVQKEFPALKTSIIVLQGKEKAIQKIAGFRFRRLEEKSFWKRLSEEQKDDFFSAWTNTPDDKRLSKYLMKHLLLTE
NEVVDALKTVSLIGDYGPIGKTATQLLMKHLEDGLTYTEALERGMETGEFQELSVWEQQSLLPYYGQILTGSTQALMGKYWHS
AFKEKRDSEGFFKPNTNSDEEKYGRIANPVVHQTLNELRKLMNELITILGAKPQEITVELARELKVGAEKREDIIKQQTKQEK
EAVLAYSKYCEPNNLDKRYIERFRLLEDQAFVCPYCLEHISVADIAAGRADVDHIFPRDDTADNSYGNKVVAHRQCNDIKGKR
TPYAAFSNTSAWGPIMHYLDETPGMWRKRRKFETNEEEYAKYLQSKGFVSRFESDNSYIAKAAKEYLRCLFNPNNVTAVGSLK
GMETSILRKAWNLQGIDDLLGSRHWSKDADTSPTMRKNRDDNRHHGLDAIVALYCSRSLVQMINTMSEQGKRAVEIEAMIPIP
GYASEPNLSFEAQRELFRKKILEFMDLHAFVSMKTDNDANGALLKDTVYSILGADTQGEDLVFVVKKKIKDIGVKIGDYEEVA
SAIRGRITDKQPKWYPMEMKDKIEQLQSKNEAALQKYKESLVQAAAVLEESNRKLIESGKKPIQLSEKTISKKALELVGGYYY
LISNNKRTKTFVVKEPSNEVKGFAFDTGSNLCLDFYHDAQGKLCGEIIRKIQAMNPSYKPAYMKQGYSLYVRLYQGDVCELRA
SDLTEAESNLAKTTHVRLPNAKPGRTFVIIITFTEMGSGYQIYFSNLAKSKKGQDTSFTLTTIKNYDVRKVQLSSAGLVRYVS
PLLVDKIEKDEVALCGE
SEQ ID NO: 73
MNQKFILGLDIGITSVGYGLIDYETKNIIDAGVRLFPEANVENNEGRRSKRGSRRLKRRRIHRLERVKKLLEDYNLLDQSQIP
QSTNPYAIRVKGLSEALSKDELVIALLHIAKRRGIHKIDVIDSNDDVGNELSTKEQLNKNSKLLKDKFVCQIQLERMNEGQVR
GEKNRFKTADIIKEIIQLLNVQKNFHQLDENFINKYIELVEMRREYFEGPGKGSPYGWEGDPKAWYETLMGHCTYFPDELRSV
KYAYSADLFNALNDLNNLVIQRDGLSKLEYHEKYHIIENVFKQKKKPTLKQIANEINVNPEDIKGYRITKSGKPQFTEFKLYH
DLKSVLFDQSILENEDVLDQIAEILTIYQDKDSIKSKLTELDILLNEEDKENIAQLTGYTGTHRLSLKCIRLVLEEQWYSSRN
QMEIFTHLNIKPKKINLTAANKIPKAMIDEFILSPVVKRTFGQAINLINKIIEKYGVPEDIIIELARENNSKDKQKFINEMQK
KNENTRKRINEIIGKYGNQNAKRLVEKIRLHDEQEGKCLYSLESIPLEDLLNNPNHYEVDHIIPRSVSFDNSYHNKVLVKQSE
NSKKSNLTPYQYFNSGKSKLSYNQFKQHILNLSKSQDRISKKKKEYLLEERDINKFEVQKEFINRNLVDTRYATRELTNYLKA
YFSANNMNVKVKTINGSFTDYLRKVWKFKKERNHGYKHHAEDALIIANADFLFKENKKLKAVNSVLEKPEIESKQLDIQVDSE
DNYSEMFIIPKQVQDIKDFRNFKYSHRVDKKPNRQLINDTLYSTRKKDNSTYIVQTIKDIYAKDNTTLKKQFDKSPEKFLMYQ
HDPRTFEKLEVIMKQYANEKNPLAKYHEETGEYLTKYSKKNNGPIVKSLKYIGNKLGSHLDVTHQFKSSTKKLVKLSIKPYRF
DVYLTDKGYKFITISYLDVLKKDNYYYIPEQKYDKLKLGKAIDKNAKFIASFYKNDLIKLDGEIYKIIGVNSDTRNMIELDLP
DIRYKEYCELNNIKGEPRIKKTIGKKVNSIEKLTTDVLGNVFTNTQYTKPQLLFKRGN
SEQ ID NO: 74
MIMKLEKWRLGLDLGTNSIGWSVFSLDKDNSVQDLIDMGVRIFSDGRDPKTKEPLAVARRTARSQRKLIYRRKLRRKQVFKFL
QEQGLFPKTKEECMTLKSLNPYELRIKALDEKLEPYELGRALFNLAVRRGFKSNRKDGSREEVSEKKSPDEIKTQADMQTHLE
KAIKENGCRTITEFLYKNQGENGGIRFAPGRMTYYPTRKMYEEEFNLIRSKQEKYYPQVDWDDIYKAIFYQRPLKPQQRGYCI
YENDKERTFKAMPCSQKLRILQDIGNLAYYEGGSKKRVELNDNQDKVLYELLNSKDKVTFDQMRKALCLADSNSFNLEENRDF
LIGNPTAVKMRSKNRFGKLWDEIPLEEQDLIIETIITADEDDAVYEVIKKYDLTQEQRDFIVKNTILQSGTSMLCKEVSEKLV
KRLEEIADLKYHEAVESLGYKFADQTVEKYDLLPYYGKVLPGSTMEIDLSAFETNPEKHYGKISNPTVHVALNQTRVVVNALI
KEYGKPSQIAIELSRDLKNNVEKKAEIARKQNQRAKENIAINDTISALYHTAFPGKSFYPNRNDRMKYRLWSELGLGNKCIYC
GKGISGAELFTKEIEIEHILPFSRTLLDAESNLTVAHSSCNAFKAERSPFEAFGTNPSGYSWQEIIQRANQLKNTSKKNKFSP
NAMDSFEKDSSFIARQLSDNQYIAKAALRYLKCLVENPSDVWTTNGSMTKLLRDKWEMDSILCRKFTEKEVALLGLKPEQIGN
YKKNRFDHRHHAIDAVVIGLTDRSMVQKLATKNSHKGNRIEIPEFPILRSDLIEKVKNIVVSFKPDHGAEGKLSKETLLGKIK
LHGKETFVCRENIVSLSEKNLDDIVDEIKSKVKDYVAKHKGQKIEAVLSDFSKENGIKKVRCVNRVQTPIEITSGKISRYLSP
EDYFAAVIWEIPGEKKTFKAQYIRRNEVEKNSKGLNVVKPAVLENGKPHPAAKQVCLLHKDDYLEFSDKGKMYFCRIAGYAAT
NNKLDIRPVYAVSYCADWINSTNETMLTGYWKPTPTQNWVSVNVLFDKQKARLVTVSPIGRVFRK
SEQ ID NO: 75
MSSKAIDSLEQLDLFKPQEYTLGLDLGIKSIGWAILSGERIANAGVYLFETAEELNSTGNKLISKAAERGRKRRIRRMLDRKA
RRGRHIRYLLEREGLPTDELEEVVVHQSNRTLWDVRAEAVERKLTKQELAAVLFHLVRHRGYFPNTKKLPPDDESDSADEEQG
KINRATSRLREELKASDCKTIGQFLAQNRDRQRNREGDYSNLMARKLVFEEALQILAFQRKQGHELSKDFEKTYLDVLMGQRS
GRSPKLGNCSLIPSELRAPSSAPSTEWFKFLQNLGNLQISNAYREEWSIDAPRRAQIIDACSQRSTSSYWQIRRDFQIPDEYR
FNLVNYERRDPDVDLQEYLQQQERKTLANFRNWKQLEKIIGTGHPIQTLDEAARLITLIKDDEKLSDQLADLLPEASDKAITQ
LCELDFTTAAKISLEAMYRILPHMNQGMGFFDACQQESLPEIGVPPAGDRVPPFDEMYNPVVNRVLSQSRKLINAVIDEYGMP
AKIRVELARDLGKGRELRERIKLDQLDKSKQNDQRAEDFRAEFQQAPRGDQSLRYRLWKEQNCTCPYSGRMIPVNSVLSEDTQ
IDHILPISQSFDNSLSNKVLCFTEENAQKSNRTPFEYLDAADFQRLEAISGNWPEAKRNKLLHKSFGKVAEEWKSRALNDTRY
LTSALADHLRHHLPDSKIQTVNGRITGYLRKQWGLEKDRDKHTHHAVDAIVVACTTPAIVQQVTLYHQDIRRYKKLGEKRPTP
WPETFRQDVLDVEEEIFITRQPKKVSGGIQTKDTLRKHRSKPDRQRVALTKVKLADLERLVEKDASNRNLYEHLKQCLEESGD
QPTKAFKAPFYMPSGPEAKQRPILSKVTLLREKPEPPKQLTELSGGRRYDSMAQGRLDIYRYKPGGKRKDEYRVVLQRMIDLM
RGEENVHVFQKGVPYDQGPEIEQNYTFLFSLYFDDLVEFQRSADSEVIRGYYRTFNIANGQLKISTYLEGRQDFDFFGANRLA
HFAKVQVNLLGKVIK
SEQ ID NO: 76
MRSLRYRLALDLGSTSLGWALFRLDACNRPTAVIKAGVRIFSDGRNPKDGSSLAVTRRAARAMRRRRDRLLKRKTRMQAKLVE
HGFFPADAGKRKALEQLNPYALRAKGLQEALLPGEFARALFHINQRRGFKSNRKTDKKDNDSGVLKKAIGQLRQQMAEQGSRT
VGEYLWTRLQQGQGVRARYREKPYTTEEGKKRIDKSYDLYIDRAMIEQEFDALWAAQAAFNPTLFHEAARADLKDTLLHQRPL
RPVKPGRCTLLPEEERAPLALPSTQRFRIHQEVNHLRLLDENLREVALTLAQRDAVVTALETKAKLSFEQIRKLLKLSGSVQF
NLEDAKRTELKGNATSAALARKELFGAAWSGFDEALQDEIVWQLVTEEGEGALIAWLQTHTGVDEARAQAIVDVSLPEGYGNL
SRKALARIVPALRAAVITYDKAVQAAGFDHHSQLGFEYDASEVEDLVHPETGEIRSVFKQLPYYGKALQRHVAFGSGKPEDPD
EKRYGKIANPTVHIGLNQVRMVVNALIRRYGRPTEVVIELARDLKQSREQKVEAQRRQADNQRRNARIRRSIAEVLGIGEERV
RGSDIQKWICWEELSFDAADRRCPYSGVQISAAMLLSDEVEVEHILPFSKTLDDSLNNRTVAMRQANRIKRNRTPWDARAEFE
AQGWSYEDILQRAERMPLRKRYRFAPDGYERWLGDDKDFLARALNDTRYLSRVAAEYLRLVCPGTRVIPGQLTALLRGKFGLN
DVLGLDGEKNRNDHRHHAVDACVIGVTDQGLMQRFATASAQARGDGLTRLVDGMPMPWPTYRDHVERAVRHIWVSHRPDHGFE
GAMMEETSYGIRKDGSIKQRRKADGSAGREISNLIRIHEATQPLRHGVSADGQPLAYKGYVGGSNYCIEITVNDKGKWEGEVI
STFRAYGVVRAGGMGRLRNPHEGQNGRKLIMRLVIGDSVRLEVDGAERTMRIVKISGSNGQIFMAPIHEANVDARNTDKQDAF
TYTSKYAGSLQKAKTRRVTISPIGEVRDPGFKG
SEQ ID NO: 77
MARPAFRAPRREHVNGWTPDPHRISKPFFILVSWHLLSRVVIDSSSGCFPGTSRDHTDKFAEWECAVQPYRLSFDLGTNSIGW
GLLNLDRQGKPREIRALGSRIFSDGRDPQDKASLAVARRLARQMRRRRDRYLTRRTRLMGALVRFGLMPADPAARKRLEVAVD
PYLARERATRERLEPFEIGRALFHLNQRRGYKPVRTATKPDEEAGKVKEAVERLEAAIAAAGAPTLGAWFAWRKTRGETLRAR
LAGKGKEAAYPFYPARRMLEAEFDTLWAEQARHHPDLLTAEAREILRHRIFHQRPLKPPPVGRCTLYPDDGRAPRALPSAQRL
RLFQELASLRVIHLDLSERPLTPAERDRIVAFVQGRPPKAGRKPGKVQKSVPFEKLRGLLELPPGTGFSLESDKRPELLGDET
GARIAPAFGPGWTALPLEEQDALVELLLTEAEPERAIAALTARWALDEATAAKLAGATLPDFHGRYGRRAVAELLPVLERETR
GDPDGRVRPIRLDEAVKLLRGGKDHSDFSREGALLDALPYYGAVLERHVAFGTGNPADPEEKRVGRVANPTVHIALNQLRHLV
NAILARHGRPEEIVIELARDLKRSAEDRRREDKRQADNQKRNEERKRLILSLGERPTPRNLLKLRLWEEQGPVENRRCPYSGE
TISMRMLLSEQVDIDHILPFSVSLDDSAANKVVCLREANRIKRNRSPWEAFGHDSERWAGILARAEALPKNKRWRFAPDALEK
LEGEGGLRARHLNDTRHLSRLAVEYLRCVCPKVRVSPGRLTALLRRRWGIDAILAEADGPPPEVPAETLDPSPAEKNRADHRH
HALDAVVIGCIDRSMVQRVQLAAASAEREAAAREDNIRRVLEGFKEEPWDGFRAELERRARTIVVSHRPEHGIGGALHKETAY
GPVDPPEEGFNLVVRKPIDGLSKDEINSVRDPRLRRALIDRLAIRRRDANDPATALAKAAEDLAAQPASRGIRRVRVLKKESN
PIRVEHGGNPSGPRSGGPFHKLLLAGEVHHVDVALRADGRRWVGHWVTLFEAHGGRGADGAAAPPRLGDGERFLMRLHKGDCL
KLEHKGRVRVMQVVKLEPSSNSVVVVEPHQVKTDRSKHVKISCDQLRARGARRVTVDPLGRVRVHAPGARVGIGGDAGRTAME
PAEDIS
SEQ ID NO: 78
MKRTSLRAYRLGVDLGANSLGWFVVWLDDHGQPEGLGPGGVRIFPDGRNPQSKQSNAAGRRLARSARRRRDRYLQRRGKLMGL
LVKHGLMPADEPARKRLECLDPYGLRAKALDEVLPLHHVGRALFHLNQRRGLFANRAIEQGDKDASAIKAAAGRLQTSMQACG
ARTLGEFLNRRHQLRATVRARSPVGGDVQARYEFYPTRAMVDAEFEAIWAAQAPHHPTMTAEAHDTIREAIFSQRAMKRPSIG
KCSLDPATSQDDVDGFRCAWSHPLAQRFRIWQDVRNLAVVETGPTSSRLGKEDQDKVARALLQTDQLSFDEIRGLLGLPSDAR
FNLESDRRDHLKGDATGAILSARRHFGPAWHDRSLDRQIDIVALLESALDEAAIIASLGTTHSLDEAAAQRALSALLPDGYCR
LGLRAIKRVLPLMEAGRTYAEAASAAGYDHALLPGGKLSPTGYLPYYGQWLQNDVVGSDDERDTNERRWGRLPNPTVHIGIGQ
LRRVVNELIRWHGPPAEITVELTRDLKLSPRRLAELEREQAENQRKNDKRTSLLRKLGLPASTHNLLKLRLWDEQGDVASECP
YTGEAIGLERLVSDDVDIDHLIPFSISWDDSAANKVVCMRYANREKGNRTPFEAFGHRQGRPYDWADIAERAARLPRGKRWRF
GPGARAQFEELGDFQARLLNETSWLARVAKQYLAAVTHPHRIHVLPGRLTALLRATWELNDLLPGSDDRAAKSRKDHRHHAID
ALVAALTDQALLRRMANAHDDTRRKIEVLLPWPTFRIDLETRLKAMLVSHKPDHGLQARLHEDTAYGTVEHPETEDGANLVYR
KTFVDISEKEIDRIRDRRLRDLVRAHVAGERQQGKTLKAAVLSFAQRRDIAGHPNGIRHVRLTKSIKPDYLVPIRDKAGRIYK
SYNAGENAFVDILQAESGRWIARATTVFQANQANESHDAPAAQPIMRVFKGDMLRIDHAGAEKFVKIVRLSPSNNLLYLVEHH
QAGVFQTRHDDPEDSFRWLFASFDKLREWNAELVRIDTLGQPWRRKRGLETGSEDATRIGWTRPKKWP
SEQ ID NO: 79
MERIFGFDIGTTSIGFSVIDYSSTQSAGNIQRLGVRIFPEARDPDGTPLNQQRRQKRMMRRQLRRRRIRRKALNETLHEAGFL
PAYGSADWPVVMADEPYELRRRGLEEGLSAYEFGRAIYHLAQHRHFKGRELEESDTPDPDVDDEKEAANERAATLKALKNEQT
TLGAWLARRPPSDRKRGIHAHRNVVAEEFERLWEVQSKFHPALKSEEMRARISDTIFAQRPVFWRKNTLGECRFMPGEPLCPK
GSWLSQQRRMLEKLNNLAIAGGNARPLDAEERDAILSKLQQQASMSWPGVRSALKALYKQRGEPGAEKSLKFNLELGGESKLL
GNALEAKLADMFGPDWPAHPRKQEIRHAVHERLWAADYGETPDKKRVIILSEKDRKAHREAAANSFVADFGITGEQAAQLQAL
KLPTGWEPYSIPALNLFLAELEKGERFGALVNGPDWEGWRRTNFPHRNQPTGEILDKLPSPASKEERERISQLRNPTVVRTQN
ELRKVVNNLIGLYGKPDRIRIEVGRDVGKSKREREEIQSGIRRNEKQRKKATEDLIKNGIANPSRDDVEKWILWKEGQERCPY
TGDQIGFNALFREGRYEVEHIWPRSRSFDNSPRNKTLCRKDVNIEKGNRMPFEAFGHDEDRWSAIQIRLQGMVSAKGGTGMSP
GKVKRFLAKTMPEDFAARQLNDTRYAAKQILAQLKRLWPDMGPEAPVKVEAVTGQVTAQLRKLWTLNNILADDGEKTRADHRH
HAIDALTVACTHPGMTNKLSRYWQLRDDPRAEKPALTPPWDTIRADAEKAVSEIVVSHRVRKKVSGPLHKETTYGDTGTDIKT
KSGTYRQFVTRKKIESLSKGELDEIRDPRIKEIVAAHVAGRGGDPKKAFPPYPCVSPGGPEIRKVRLTSKQQLNLMAQTGNGY
ADLGSNHHIAIYRLPDGKADFEIVSLFDASRRLAQRNPIVQRTRADGASFVMSLAAGEAIMIPEGSKKGIWIVQGVWASGQVV
LERDTDADHSTTTRPMPNPILKDDAKKVSIDPIGRVRPSND
SEQ ID NO: 80
MNKRILGLDTGTNSLGWAVVDWDEHAQSYELIKYGDVIFQEGVKIEKGIESSKAAERSGYKAIRKQYFRRRLRKIQVLKVLVK
YHLCPYLSDDDLRQWHLQKQYPKSDELMLWQRTSDEEGKNPYYDRHRCLHEKLDLTVEADRYTLGRALYHLTQRRGFLSNRLD
TSADNKEDGVVKSGISQLSTEMEEAGCEYLGDYFYKLYDAQGNKVRIRQRYTDRNKHYQHEFDAICEKQELSSELIEDLQRAI
FFQLPLKSQRHGVGRCTFERGKPRCADSHPDYEEFRMLCFVNNIQVKGPHDLELRPLTYEEREKIEPLFFRKSKPNFDFEDIA
KALAGKKNYAWIHDKEERAYKFNYRMTQGVPGCPTIAQLKSIFGDDWKTGIAETYTLIQKKNGSKSLQEMVDDVWNVLYSFSS
VEKLKEFAHHKLQLDEESAEKFAKIKLSHSFAALSLKAIRKFLPFLRKGMYYTHASFFANIPTIVGKEIWNKEQNRKYIMENV
GELVFNYQPKHREVQGTIEMLIKDFLANNFELPAGATDKLYHPSMIETYPNAQRNEFGILQLGSPRTNAIRNPMAMRSLHILR
RVVNQLLKESIIDENTEVHVEYARELNDANKRRAIADRQKEQDKQHKKYGDEIRKLYKEETGKDIEPTQTDVLKFQLWEEQNH
HCLYTGEQIGITDFIGSNPKFDIEHTIPQSVGGDSTQMNLTLCDNRFNREVKKAKLPTELANHEEILTRIEPWKNKYEQLVKE
RDKQRTFAGMDKAVKDIRIQKRHKLQMEIDYWRGKYERFTMTEVPEGFSRRQGTGIGLISRYAGLYLKSLFHQADSRNKSNVY
VVKGVATAEFRKMWGLQSEYEKKCRDNHSHHCMDAITIACIGKREYDLMAEYYRMEETFKQGRGSKPKFSKPWATFTEDVLNI
YKNLLVVHDTPNNMPKHTKKYVQTSIGKVLAQGDTARGSLHLDTYYGAIERDGEIRYVVRRPLSSFTKPEELENIVDETVKRT
IKEAIADKNFKQAIAEPIYMNEEKGILIKKVRCFAKSVKQPINIRQHRDLSKKEYKQQYHVMNENNYLLAIYEGLVKNKVVRE
FEIVSYIEAAKYYKRSQDRNIFSSIVPTHSTKYGLPLKTKLLMGQLVLMFEENPDEIQVDNTKDLVKRLYKVVGIEKDGRIKF
KYHQEARKEGLPIFSTPYKNNDDYAPIFRQSINNINILVDGIDFTIDILGKVTLKE
SEQ ID NO: 81
MNYKMGLDIGIASVGWAVINLDLKRIEDLGVRIFDKAEHPQNGESLALPRRIARSARRRLRRRKHRLERIRRLLVSENVLTKE
EMNLLFKQKKQIDVWQLRVDALERKLNNDELARVLLHLAKRRGFKSNRKSERNSKESSEFLKNIEENQSILAQYRSVGEMIVK
DSKFAYHKRNKLDSYSNMIARDDLEREIKLIFEKQREFNNPVCTERLEEKYLNIWSSQRPFASKEDIEKKVGFCTFEPKEKRA
PKATYTFQSFIVWEHINKLRLVSPDETRALTEIERNLLYKQAFSKNKMTYYDIRKLLNLSDDIHFKGLLYDPKSSLKQIENIR
FLELDSYHKIRKCIENVYGKDGIRMFNETDIDTFGYALTIFKDDEDIVAYLQNEYITKNGKRVSNLANKVYDKSLIDELLNLS
FSKFAHLSMKAIRNILPYMEQGEIYSKACELAGYNFTGPKKKEKALLLPVIPNIANPVVMRALTQSRKVVNAIIKKYGSPVSI
HIELARDLSHSFDERKKIQKDQTENRKKNETAIKQLIEYELTKNPTGLDIVKFKLWSEQQGRCMYSLKPIELERLLEPGYVEV
DHILPYSRSLDDSYANKVLVLTKENREKGNHTPVEYLGLGSERWKKFEKFVLANKQFSKKKKQNLLRLRYEETEEKEFKERNL
NDTRYISKFFANFIKEHLKFADGDGGQKVYTINGKITAHLRSRWDFNKNREESDLHHAVDAVIVACATQGMIKKITEFYKARE
QNKESAKKKEPIFPQPWPHFADELKARLSKFPQESIEAFALGNYDRKKLESLRPVFVSRMPKRSVTGAAHQETLRRCVGIDEQ
SGKIQTAVKTKLSDIKLDKDGHFPMYQKESDPRTYEAIRQRLLEHNNDPKKAFQEPLYKPKKNGEPGPVIRTVKIIDTKNKVV
HLDGSKTVAYNSNIVRTDVFEKDGKYYCVPVYTMDIMKGTLPNKAIEANKPYSEWKEMTEEYTFQFSLFPNDLVRIVLPREKT
IKTSTNEEIIIKDIFAYYKTIDSATGGLELISHDRNFSLRGVGSKTLKRFEKYQVDVLGNIHKVKGEKRVGLAAPTNQKKGKT
VDSLQSVSD
SEQ ID NO: 82
MRRLGLDLGTNSIGWCLLDLGDDGEPVSIFRTGARIFSDGRDPKSLGSLKATRREARLTRRRRDRFIQRQKNLINALVKYGLM
PADEIQRQALAYKDPYPIRKKALDEAIDPYEMGRAIFHINQRRGFKSNRKSADNEAGVVKQSIADLEMKLGEAGARTIGEFLA
DRQATNDTVRARRLSGTNALYEFYPDRYMLEQEFDTLWAKQAAFNPSLYIEAARERLKEIVFFQRKLKPQEVGRCIFLSDEDR
ISKALPSFQRFRIYQELSNLAWIDHDGVAHRITASLALRDHLFDELEHKKKLTFKAMRAILRKQGVVDYPVGFNLESDNRDHL
IGNLTSCIMRDAKKMIGSAWDRLDEEEQDSFILMLQDDQKGDDEVRSILTQQYGLSDDVAEDCLDVRLPDGHGSLSKKAIDRI
LPVLRDQGLIYYDAVKEAGLGEANLYDPYAALSDKLDYYGKALAGHVMGASGKFEDSDEKRYGTISNPTVHIALNQVRAVVNE
LIRLHGKPDEVVIEIGRDLPMGADGKRELERFQKEGRAKNERARDELKKLGHIDSRESRQKFQLWEQLAKEPVDRCCPFTGKM
MSISDLFSDKVEIEHLLPFSLTLDDSMANKTVCFRQANRDKGNRAPFDAFGNSPAGYDWQEILGRSQNLPYAKRWRFLPDAMK
RFEADGGFLERQLNDTRYISRYTTEYISTIIPKNKIWVVTGRLTSLLRGFWGLNSILRGHNTDDGTPAKKSRDDHRHHAIDAI
VVGMTSRGLLQKVSKAARRSEDLDLTRLFEGRIDPWDGFRDEVKKHIDAIIVSHRPRKKSQGALHNDTAYGIVEHAENGASTV
VHRVPITSLGKQSDIEKVRDPLIKSALLNETAGLSGKSFENAVQKWCADNSIKSLRIVETVSIIPITDKEGVAYKGYKGDGNA
YMDIYQDPTSSKWKGEIVSRFDANQKGFIPSWQSQFPTARLIMRLRINDLLKLQDGEIEEIYRVQRLSGSKILMAPHTEANVD
ARDRDKNDTFKLTSKSPGKLQSASARKVHISPTGLIREG
SEQ ID NO: 83
MKNILGLDLGLSSIGWSVIRENSEEQELVAMGSRVVSLTAAELSSFTQGNGVSINSQRTQKRTQRKGYDRYQLRRTLLRNKLD
TLGMLPDDSLSYLPKLQLWGLRAKAVTQRIELNELGRVLLHLNQKRGYKSIKSDFSGDKKITDYVKTVKTRYDELKEMRLTIG
ELFFRRLTENAFFRCKEQVYPRQAYVEEFDCIMNCQRKFYPDILTDETIRCIRDEIIYYQRPLKSCKYLVSRCEFEKRFYLNA
AGKKTEAGPKVSPRTSPLFQVCRLWESINNIVVKDRRNEIVFISAEQRAALFDFLNTHEKLKGSDLLKLLGLSKTYGYRLGEQ
FKTGIQGNKTRVEIERALGNYPDKKRLLQFNLQEESSSMVNTETGEIIPMISLSFEQEPLYRLWHVLYSIDDREQLQSVLRQK
FGIDDDEVLERLSAIDLVKAGFGNKSSKAIRRILPFLQLGMNYAEACEAAGYNHSNNYTKAENEARALLDRLPAIKKNELRQP
VVEKILNQMVNVVNALMEKYGRFDEIRVELARELKQSKEERSNTYKSINKNQRENEQIAKRIVEYGVPTRSRIQKYKMWEESK
HCCIYCGQPVDVGDFLRGFDVEVEHIIPKSLYFDDSFANKVCSCRSCNKEKNNRTAYDYMKSKGEKALSDYVERVNTMYTNNQ
ISKTKWQNLLTPVDKISIDFIDRQLRESQYIARKAKEILTSICYNVTATSGSVTSFLRHVWGWDTVLHDLNFDRYKKVGLTEV
IEVNHRGSVIRREQIKDWSKRFDHRHHAIDALTIACTKQAYIQRLNNLRAEEGPDFNKMSLERYIQSQPHFSVAQVREAVDRI
LVSFRAGKRAVTPGKRYIRKNRKRISVQSVLIPRGALSEESVYGVIHVWEKDEQGHVIQKQRAVMKYPITSINREMLDKEKVV
DKRIHRILSGRLAQYNDNPKEAFAKPVYIDKECRIPIRTVRCFAKPAINTLVPLKKDDKGNPVAWVNPGNNHHVAIYRDEDGK
YKERTVTFWEAVDRCRVGIPAIVTQPDTIWDNILQRNDISENVLESLPDVKWQFVLSLQQNEMFILGMNEEDYRYAMDQQDYA
LLNKYLYRVQKLSKSDYSFRYHTETSVEDKYDGKPNLKLSMQMGKLKRVSIKSLLGLNPHKVHISVLGEIKEIS
SEQ ID NO: 84
MAEKQHRWGLDIGTNSIGWAVIALIEGRPAGLVATGSRIFSDGRNPKDGSSLAVERRGPRQMRRRRDRYLRRRDRFMQALINV
GLMPGDAAARKALVTENPYVLRQRGLDQALTLPEFGRALFHLNQRRGFQSNRKTDRATAKESGKVKNAIAAFRAGMGNARTVG
EALARRLEDGRPVRARMVGQGKDEHYELYIAREWIAQEFDALWASQQRFHAEVLADAARDRLRAILLFQRKLLPVPVGKCFLE
PNQPRVAAALPSAQRFRLMQELNHLRVMTLADKRERPLSFQERNDLLAQLVARPKCGFDMLRKIVFGANKEAYRFTIESERRK
ELKGCDTAAKLAKVNALGTRWQALSLDEQDRLVCLLLDGENDAVLADALREHYGLTDAQIDTLLGLSFEDGHMRLGRSALLRV
LDALESGRDEQGLPLSYDKAVVAAGYPAHTADLENGERDALPYYGELLWRYTQDAPTAKNDAERKFGKIANPTVHIGLNQLRK
LVNALIQRYGKPAQIVVELARNLKAGLEEKERIKKQQTANLERNERIRQKLQDAGVPDNRENRLRMRLFEELGQGNGLGTPCI
YSGRQISLQRLFSNDVQVDHILPFSKTLDDSFANKVLAQHDANRYKGNRGPFEAFGANRDGYAWDDIRARAAVLPRNKRNRFA
ETAMQDWLHNETDFLARQLTDTAYLSRVARQYLTAICSKDDVYVSPGRLTAMLRAKWGLNRVLDGVMEEQGRPAVKNRDDHRH
HAIDAVVIGATDRAMLQQVATLAARAREQDAERLIGDMPTPWPNFLEDVRAAVARCVVSHKPDHGPEGGLHNDTAYGIVAGPF
EDGRYRVRHRVSLFDLKPGDLSNVRCDAPLQAELEPIFEQDDARAREVALTALAERYRQRKVWLEELMSVLPIRPRGEDGKTL
PDSAPYKAYKGDSNYCYELFINERGRWDGELISTFRANQAAYRRFRNDPARFRRYTAGGRPLLMRLCINDYIAVGTAAERTIF
RVVKMSENKITLAEHFEGGTLKQRDADKDDPFKYLTKSPGALRDLGARRIFVDLIGRVLDPGIKGD
SEQ ID NO: 86
MIERILGVDLGISSLGWAIVEYDKDDEAANRIIDCGVRLFTAAETPKKKESPNKARREARGIRRVLNRRRVRMNMIKKLFLRA
GLIQDVDLDGEGGMFYSKANRADVWELRHDGLYRLLKGDELARVLIHIAKHRGYKFIGDDEADEESGKVKKAGVVLRQNFEAA
GCRTVGEWLWRERGANGKKRNKHGDYEISIHRDLLVEEVEAIFVAQQEMRSTIATDALKAAYREIAFFVRPMQRIEKMVGHCT
YFPEERRAPKSAPTAEKFIAISKFFSTVIIDNEGWEQKIIERKTLEELLDFAVSREKVEFRHLRKFLDLSDNEIFKGLHYKGK
PKTAKKREATLFDPNEPTELEFDKVEAEKKAWISLRGAAKLREALGNEFYGRFVALGKHADEATKILTYYKDEGQKRRELTKL
PLEAEMVERLVKIGFSDFLKLSLKAIRDILFAMESGARYDEAVLMLGVPHKEKSAILPPLNKTDIDILNPTVIRAFAQFRKVA
NALVRKYGAFDRVHFELAREINTKGEIEDIKESQRKNEKERKEAADWIAETSFQVPLTRKNILKKRLYIQQDGRCAYTGDVIE
LERLFDEGYCEIDHILPRSRSADDSFANKVLCLARANQQKTDRTPYEWFGHDAARWNAFETRTSAPSNRVRTGKGKIDRLLKK
NFDENSEMAFKDRNLNDTRYMARAIKTYCEQYWVFKNSHTKAPVQVRSGKLTSVLRYQWGLESKDRESHTHHAVDAIIIAFST
QGMVQKLSEYYRFKETHREKERPKLAVPLANFRDAVEEATRIENTETVKEGVEVKRLLISRPPRARVTGQAHEQTAKPYPRIK
QVKNKKKWRLAPIDEEKFESFKADRVASANQKNFYETSTIPRVDVYHKKGKFHLVPIYLHEMVLNELPNLSLGTNPEAMDENF
FKFSIFKDDLISIQTQGTPKKPAKIIMGYFKNMHGANMVLSSINNSPCEGFTCTPVSMDKKHKDKCKLCPEENRIAGRCLQGF
LDYWSQEGLRPPRKEFECDQGVKFALDVKKYQIDPLGYYYEVKQEKRLGTIPQMRSAKKLVKK
SEQ ID NO: 87
MNNSIKSKPEVTIGLDLGVGSVGWAIVDNETNIIHHLGSRLFSQAKTAEDRRSFRGVRRLIRRRKYKLKRFVNLIWKYNSYFGFKNKEDILNNY
QEQQKLHNTVLNLKSEALNAKIDPKALSWILHDYLKNRGHFYEDNRDFNVYPTKELAKYFDKYGYYKGIIDSKEDNDNKLEEELTKYKFSNKHW
LEEVKKVLSNQTGLPEKFKEEYESLFSYVRNYSEGPGSINSVSPYGIYHLDEKEGKVVQKYNNIWDKTIGKCNIFPDEYRAPKNSPIAMIFNEI
NELSTIRSYSIYLTGWFINQEFKKAYLNKLLDLLIKTNGEKPIDARQFKKLREETIAESIGKETLKDVENEEKLEKEDHKWKLKGLKLNTNGKI
QYNDLSSLAKFVHKLKQHLKLDFLLEDQYATLDKINFLQSLFVYLGKHLRYSNRVDSANLKEFSDSNKLFERILQKQKDGLFKLFEQTDKDDEK
ILAQTHSLSTKAMLLAITRMTNLDNDEDNQKNNDKGWNFEAIKNFDQKFIDITKKNNNLSLKQNKRYLDDRFINDAILSPGVKRILREATKVFN
AILKQFSEEYDVTKVVIELARELSEEKELENTKNYKKLIKKNGDKISEGLKALGISEDEIKDILKSPTKSYKFLLWLQQDHIDPYSLKEIAFDD
IFTKTEKFEIDHIIPYSISFDDSSSNKLLVLAESNQAKSNQTPYEFISSGNAGIKWEDYEAYCRKFKDGDSSLLDSTQRSKKFAKMMKTDTSSK
YDIGFLARNLNDTRYATIVFRDALEDYANNHLVEDKPMFKVVCINGSVTSFLRKNFDDSSYAKKDRDKNIHHAVDASIISIFSNETKTLFNQLT
QFADYKLFKNTDGSWKKIDPKTGVVTEVTDENWKQIRVRNQVSEIAKVIEKYIQDSNIERKARYSRKIENKTNISLFNDTVYSAKKVGYEDQIK
RKNLKTLDIHESAKENKNSKVKRQFVYRKLVNVSLLNNDKLADLFAEKEDILMYRANPWVINLAEQIFNEYTENKKIKSQNVFEKYMLDLTKEF
PEKFSEFLVKSMLRNKTAIIYDDKKNIVHRIKRLKMLSSELKENKLSNVIIRSKNQSGTKLSYQDTINSLALMIMRSIDPTAKKQYIRVPLNTL
NLHLGDHDFDLHNMDAYLKKPKFVKYLKANEIGDEYKPWRVLTSGTLLIHKKDKKLMYISSFQNLNDVIEIKNLIETEYKENDDSDSKKKKKAN
RFLMTLSTILNDYILLDAKDNFDILGLSKNRIDEILNSKLGLDKIVK
SEQ ID NO: 88
MGGSEVGTVPVTWRLGVDVGERSIGLAAVSYEEDKPKEILAAVSWIHDGGVGDERSGASRLALRGMARRARRLRRFRRARLRDLDMLLSELGWT
PLPDKNVSPVDAWLARKRLAEEYVVDETERRRLLGYAVSHMARHRGWRNPWTTIKDLKNLPQPSDSWERTRESLEARYSVSLEPGTVGQWAGYL
LQRAPGIRLNPTQQSAGRRAELSNATAFETRLRQEDVLWELRCIADVQGLPEDVVSNVIDAVFCQKRPSVPAERIGRDPLDPSQLRASRACLEF
QEYRIVAAVANLRIRDGSGSRPLSLEERNAVIEALLAQTERSLTWSDIALEILKLPNESDLTSVPEEDGPSSLAYSQFAPFDETSARIAEFIAK
NRRKIPTFAQWWQEQDRTSRSDLVAALADNSIAGEEEQELLVHLPDAELEALEGLALPSGRVAYSRLTLSGLTRVMRDDGVDVHNARKTCFGVD
DNWRPPLPALHEATGHPVVDRNLAILRKFLSSATMRWGPPQSIVVELARGASESRERQAEEEAARRAHRKANDRIRAELRASGLSDPSPADLVR
ARLLELYDCHCMYCGAPISWENSELDHIVPRTDGGSNRHENLAITCGACNKEKGRRPFASWAETSNRVQLRDVIDRVQKLKYSGNMYWTRDEFS
RYKKSVVARLKRRTSDPEVIQSIESTGYAAVALRDRLLSYGEKNGVAQVAVFRGGVTAEARRWLDISIERLFSRVAIFAQSTSTKRLDRRHHAV
DAVVLTTLTPGVAKTLADARSRRVSAEFWRRPSDVNRHSTEEPQSPAYRQWKESCSGLGDLLISTAARDSIAVAAPLRLRPTGALHEETLRAFS
EHTVGAAWKGAELRRIVEPEVYAAFLALTDPGGRFLKVSPSEDVLPADENRHIVLSDRVLGPRDRVKLFPDDRGSIRVRGGAAYIASFHHARVF
RWGSSHSPSFALLRVSLADLAVAGLLRDGVDVFTAELPPWTPAWRYASIALVKAVESGDAKQVGWLVPGDELDFGPEGVTTAAGDLSMFLKYFP
ERHWVVTGFEDDKRINLKPAFLSAEQAEVLRTERSDRPDTLTEAGEILAQFFPRCWRATVAKVLCHPGLTVIRRTALGQPRWRRGHLPYSWRPW
SADPWSGGTP
SEQ ID NO: 89
MHNKKNITIGFDLGIASIGWAIIDSTTSKILDWGTRTFEERKTANERRAFRSTRRNIRRKAYRNQRFINLILKYKDLFELKNISDIQRANKKDT
ENYEKIISFFTEIYKKCAAKHSNILEVKVKALDSKIEKLDLIWILHDYLENRGFFYDLEEENVADKYEGIEHPSILLYDFFKKNGFFKSNSSIP
KDLGGYSFSNLQWVNEIKKLFEVQEINPEFSEKFLNLFTSVRDYAKGPGSEHSASEYGIFQKDEKGKVFKKYDNIWDKTIGKCSFFVEENRSPV
NYPSYEIFNLLNQLINLSTDLKTTNKKIWQLSSNDRNELLDELLKVKEKAKIISISLKKNEIKKIILKDFGFEKSDIDDQDTIEGRKIIKEEPT
TKLEVTKHLLATIYSHSSDSNWININNILEFLPYLDAICIILDREKSRGQDEVLKKLTEKNIFEVLKIDREKQLDFVKSIFSNTKFNFKKIGNF
SLKAIREFLPKMFEQNKNSEYLKWKDEEIRRKWEEQKSKLGKTDKKTKYLNPRIFQDEIISPGTKNTFEQAVLVLNQIIKKYSKENIIDAIIIE
SPREKNDKKTIEEIKKRNKKGKGKTLEKLFQILNLENKGYKLSDLETKPAKLLDRLRFYHQQDGIDLYTLDKINIDQLINGSQKYEIEHIIPYS
MSYDNSQANKILTEKAENLKKGKLIASEYIKRNGDEFYNKYYEKAKELFINKYKKNKKLDSYVDLDEDSAKNRFRFLTLQDYDEFQVEFLARNL
NDTRYSTKLFYHALVEHFENNEFFTYIDENSSKHKVKISTIKGHVTKYFRAKPVQKNNGPNENLNNNKPEKIEKNRENNEHHAVDAAIVAIIGN
KNPQIANLLTLADNKTDKKFLLHDENYKENIETGELVKIPKFEVDKLAKVEDLKKIIQEKYEEAKKHTAIKFSRKTRTILNGGLSDETLYGFKY
DEKEDKYFKIIKKKLVTSKNEELKKYFENPFGKKADGKSEYTVLMAQSHLSEFNKLKEIFEKYNGFSNKTGNAFVEYMNDLALKEPTLKAEIES
AKSVEKLLYYNFKPSDQFTYHDNINNKSFKRFYKNIRIIEYKSIPIKFKILSKHDGGKSFKDTLFSLYSLVYKVYENGKESYKSIPVTSQMRNF
GIDEFDFLDENLYNKEKLDIYKSDFAKPIPVNCKPVFVLKKGSILKKKSLDIDDFKETKETEEGNYYFISTISKRFNRDTAYGLKPLKLSVVKP
VAEPSTNPIFKEYIPIHLDELGNEYPVKIKEHTDDEKLMCTIK
DNA2 endonuclease (CCDS 44415.2)
SEQ ID NO: 85
MEQLNELELLMEKSFWEEAELPAELFQKKVVASFPRTVLSTGMDNRYLVLAVNTVQNKEGNCEKRLVITASQSLENKELCILRNDWCSVPVEPG
DIIHLEGDCTSDTWIIDKDFGYLILYPDMLISGTSIASSIRCMRRAVLSETFRSSDPATRQMLIGTVLHEVFQKAINNSFAPEKLQELAFQTIQ
EIRHLKEMYRLNLSQDEIKQEVEDYLPSFCKWAGDFMHKNTSTDFPQMQLSLPSDNSKDNSTCNIEVVKPMDIEESIWSPRFGLKGKIDVTVGV
KIHRGYKTKYKIMPLELKTGKESNSIEHRSQVVLYTLLSQERRADPEAGLLLYLKTGQMYPVPANHLDKRELLKLRNQMAFSLFHRISKSATRQ
KTQLASLPQIIEEEKTCKYCSQIGNCALYSRAVEQQMDCSSVPIVMLPKIEEETQHLKQTHLEYFSLWCLMLTLESQSKDNKKNHQNIWLMPAS
EMEKSGSCIGNLIRMEHVKIVCDGQYLHNFQCKHGAIPVTNLMAGDRVIVSGEERSLFALSRGYVKEINMTTVTCLLDRNLSVLPESTLFRLDQ
EEKNCDIDTPLGNLSKLMENTFVSKKLRDLIIDFREPQFISYLSSVLPHDAKDTVACILKGLNKPQRQAMKKVLLSKDYTLIVGMPGTGKTTTI
CTLVRILYACGFSVLLTSYTHSAVDNILLKLAKFKIGFLRLGQIQKVHPAIQQFTEQEICRSKSIKSLALLEELYNSQLIVATTCMGINHPIFS
RKIFDFCIVDEASQISQPICLGPLFFSRRFVLVGDHQQLPPLVLNREARALGMSESLFKRLEQNKSAVVQLTVQYRMNSKIMSLSNKLIYEGKL
ECGSDKVANAVINLRHFKDVKLELEFYADYSDNPWLMGVFEPNNPVCFLNTDKVPAPEQVEKGGVSNVTEAKLIVFLTSIFVKAGCSPSDIGII
APYRQQLKIINDLLARSIGMVEVNTVDKYQGRDKSIVLVSFVRSNKDGTVGELLKDWRRLNVAITRAKHKLILLGCVPSLNCYPPLEKLLNHLN
SEKLIIDLPSREHESLCHILGDFQRE
Ezh2
>sp|Q15910|EZH2_HUMAN Histone-lysine N-methyltransferase EZH2 OS = Homo sapiens
GN = EZH2 PE = 1 SV = 2
(SEQ ID NO: 2282)
MGQTGKKSEKGPVCWRKRVKSEYMRLRQLKRFRRADEVKSMFSSNRQKILERTEILNQEWKQRRIQPVHILTSVSSLRGTRECSVTSDLDFPTQ
VIPLKTLNAVASVPIMYSWSPLQQNFMVEDETVLHNIPYMGDEVLDQDGTFIEELIKNYDGKVHGDRECGFINDEIFVELVNALGQYNDDDDDD
DGDDPEEREEKQKDLEDHRDDKESRPPRKFPSDKIFEAISSMFPDKGTAEELKEKYKELTEQQLPGALPPECTPNIDGPNAKSVQREQSLHSFH
TLFCRRCFKYDCFLHPFHATPNTYKRKNTETALDNKPCGPQCYQHLEGAKEFAAALTAERIKTPPKRPGGRRRGRLPNNSSRPSTPTINVLESK
DTDSDREAGTETGGENNDKEEEEKKDETSSSSEANSRCQTPIKMKPNIEPPENVEWSGAEASMFRVLIGTYYDNFCAIARLIGTKTCRQVYEFR
VKESSIIAPAPAEDVDTPPRKKKRKHRLWAAHCRKIQLKKDGSSNHVYNYQPCDHPRQPCDSSCPCVIAQNFCEKFCQCSSECQNRFPGCRCKA
QCNTKQCPCYLAVRECDPDLCLTCGAADHWDSKNVSCKNCSIQRGSKKHLLLAPSDVAGWGIFIKDPVQKNEFISEYCGEIISQDEADRRGKVY
DKYMCSFLFNLNNDFVVDATRKGNKIRFANHSVNPNCYAKVMMVNGDHRIGIFAKRAIQTGEELFFDYRYSQADALKYVGIEREMEIP
>sp|Q15910-2|EZH2_HUMAN Isoform 2 of Histone-lysine N-methyltransferase EZH2 OS = Homo sapiens
GN = EZH2
(SEQ ID NO: 2283)
MGQTGKKSEKGPVCWRKRVKSEYMRLRQLKRFRRADEVKSMFSSNRQKILERTEILNQEWKQRRIQPVHILTSVSSLRGTRECSVTSDLDFPTQ
VIPLKTLNAVASVPIMYSWSPLQQNFMVEDETVLHNIPYMGDEVLDQDGTFIEELIKNYDGKVHGDRECGFINDEIFVELVNALGQYNDDDDDD
DGDDPEEREEKQKDLEDHRDDKESRPPRKFPSDKIFEAISSMFPDKGTAEELKEKYKELTEQQLPGALPPECTPNIDGPNAKSVQREQSLHSFH
TLFCRRCFKYDCFLHRKCNYSFHATPNTYKRKNTETALDNKPCGPQCYQHLEGAKEFAAALTAERIKTPPKRPGGRRRGRLPNNSSRPSTPTIN
VLESKDTDSDREAGTETGGENNDKEEEEKKDETSSSSEANSRCQTPIKMKPNIEPPENVEWSGAEASMFRVLIGTYYDNFCAIARLIGTKTCRQ
VYEFRVKESSIIAPAPAEDVDTPPRKKKRKHRLWAAHCRKIQLKKDGSSNHVYNYQPCDHPRQPCDSSCPCVIAQNFCEKFCQCSSECQNRFPG
CRCKAQCNTKQCPCYLAVRECDPDLCLTCGAADHWDSKNVSCKNCSIQRGSKKHLLLAPSDVAGWGIFIKDPVQKNEFISEYCGEIISQDEADR
RGKVYDKYMCSFLFNLNNDFVVDATRKGNKIRFANHSVNPNCYAKVMMVNGDHRIGIFAKRAIQTGEELFFDYRYSQADALKYVGIEREMEIP
>sp|Q15910-3|EZH2_HUMAN Isoform 3 of Histone-lysine N-methyltransferase EZH2
OS = Homo sapiens GN = EZH2
(SEQ ID NO: 2284)
MGQTGKKSEKGPVCWRKRVKSEYMRLRQLKRFRRADEVKSMFSSNRQKILERTEILNQEWKQRRIQPVHILTSVSSLRGTREVEDETVLHNIPY
MGDEVLDQDGTFIEELIKNYDGKVHGDRECGFINDEIFVELVNALGQYNDDDDDDDGDDPEEREEKQKDLEDHRDDKESRPPRKFPSDKIFEAI
SSMFPDKGTAEELKEKYKELTEQQLPGALPPECTPNIDGPNAKSVQREQSLHSFHTLFCRRCFKYDCFLHPFHATPNTYKRKNTETALDNKPCG
PQCYQHLEGAKEFAAALTAERIKTPPKRPGGRRRGRLPNNSSRPSTPTINVLESKDTDSDREAGTETGGENNDKEEEEKKDETSSSSEANSRCQ
TPIKMKPNIEPPENVEWSGAEASMFRVLIGTYYDNFCAIARLIGTKTCRQVYEFRVKESSIIAPAPAEDVDTPPRKKKRKHRLWAAHCRKIQLK
KDGSSNHVYNYQPCDHPRQPCDSSCPCVIAQNFCEKFCQCSSECQNRFPGCRCKAQCNTKQCPCYLAVRECDPDLCLTCGAADHWDSKNVSCKN
CSIQRGSKKHLLLAPSDVAGWGIFIKDPVQKNEFISEYCGEIISQDEADRRGKVYDKYMCSFLENLNNDFVVDATRKGNKIRFANHSVNPNCYA
KVMMVNGDHRIGIFAKRAIQTGEELFFDYRYSQADALKYVGIEREMEIP
HDAC1
>sp|Q13547|HDAC1_HUMAN Histone deacetylase 1 OS = Homo sapiens
GN = HDAC1 PE = 1 SV = 1
(SEQ ID NO: 2285)
MAQTQGTRRKVCYYYDGDVGNYYYGQGHPMKPHRIRMTHNLLLNYGLYRKMEIYRPHKANAEEMTKYHSDDYIKFLRSIRPDNMSEYSKQMQRF
NVGEDCPVFDGLFEFCQLSTGGSVASAVKLNKQQTDIAVNWAGGLHHAKKSEASGFCYVNDIVLAILELLKYHQRVLYIDIDIHHGDGVEEAFY
TTDRVMTVSFHKYGEYFPGTGDLRDIGAGKGKYYAVNYPLRDGIDDESYEAIFKPVMSKVMEMFQPSAVVLQCGSDSLSGDRLGCFNLTIKGHA
KCVEFVKSFNLPMLMLGGGGYTIRNVARCWTYETAVALDTEIPNELPYNDYFEYFGPDFKLHISPSNMTNQNTNEYLEKIKQRLFENLRMLPHA
PGVQMQAIPEDAIPEESGDEDEDDPDKRISICSSDKRIACEEEFSDSEEEGEGGRKNSSNFKKAKRVKTEDEKEKDPEEKKEVTEEEKTKEEKP
EAKGVKEEVKLA
HDAC2
(SEQ ID NO: 2286)
MAYSQGGGKKKVCYYYDGDIGNYYYGQGHPMKPHRIRMTHNLLLNYGLYRKMETYRPHKATAEEMTKYHSDEYIKFLRSIRPDNMSEYSKQMQR
FNVGEDCPVFDGLFEFCQLSTGGSVAGAVKLNRQQTDMAVNWAGGLHHAKKSEASGFCYVNDIVLAILELLKYHQRVLYIDIDIHHGDGVEEAF
YTTDRVMTVSFHKYGEYFPGTGDLRDIGAGKGKYYAVNFPMRDGIDDESYGQIFKPIISKVMEMYQPSAVVLQCGADSLSGDRLGCFNLTVKGH
AKCVEVVKTFNLPLLMLGGGGYTIRNVARCWTYETAVALDCEIPNELPYNDYFEYFGPDFKLHISPSNMTNQNTPEYMEKIKQRLFENLRMLPH
APGVQMQAIPEDAVHEDSGDEDGEDPDKRISIRASDKRIACDEEFSDSEDEGEGGRRNVADHKKGAKKARIEEDKKETEDKKTDVKEEDKSKDN
SGEKTDTKGTKSEQLSNP
KDM4A/JMJD2A
>sp|O75164|KDM4A_HUMAN Lysine-specific demethylase 4A OS = Homo sapiens
GN = KDM4A PE = 1 SV = 2
(SEQ ID NO: 2287)
MASESETLNPSARIMTFYPTMEEFRNFSRYIAYIESQGAHRAGLAKVVPPKEWKPRASYDDIDDLVIPAPIQQLVTGQSGLFTQYNIQKKAMTV
REFRKIANSDKYCTPRYSEFEELERKYWKNLTFNPPIYGADVNGTLYEKHVDEWNIGRLRTILDLVEKESGITIEGVNTPYLYFGMWKTSFAWH
TEDMDLYSINYLHFGEPKSWYSVPPEHGKRLERLAKGFFPGSAQSCEAFLRHKMTLISPLMLKKYGIPFDKVTQEAGEFMITFPYGYHAGFNHG
FNCAESTNFATRRWIEYGKQAVLCSCRKDMVKISMDVFVRKFQPERYKLWKAGKDNTVIDHTLPTPEAAEFLKESELPPRAGNEEECPEEDMEG
VEDGEEGDLKTSLAKHRIGTKRHRVCLEIPQEVSQSELFPKEDLSSEQYEMTECPAALAPVRPTHSSVRQVEDGLTFPDYSDSTEVKFEELKNV
KLEEEDEEEEQAAAALDLSVNPASVGGRLVFSGSKKKSSSSLGSGSSRDSISSDSETSEPLSCRAQGQTGVLTVHSYAKGDGRVTVGEPCTRKK
GSAARSFSERELAEVADEYMFSLEENKKSKGRRQPLSKLPRHHPLVLQECVSDDETSEQLTPEEEAEETEAWAKPLSQLWQNRPPNFEAEKEFN
ETMAQQAPHCAVCMIFQTYHQVEFGGFNQNCGNASDLAPQKQRTKPLIPEMCFTSTGCSTDINLSTPYLEEDGTSILVSCKKCSVRVHASCYGV
PPAKASEDWMCSRCSANALEEDCCLCSLRGGALQRANDDRWVHVSCAVAILEARFVNIAERSPVDVSKIPLPRFKLKCIFCKKRRKRTAGCCVQ
CSHGRCPTAFHVSCAQAAGVMMQPDDWPFVVFITCFRHKIPNLERAKGALQSITAGQKVISKHKNGRFYQCEVVRLTTETFYEVNFDDGSFSDN
LYPEDIVSQDCLQFGPPAEGEVVQVRWTDGQVYGAKFVASHPIQMYQVEFEDGSQLVVKRDDVYTLDEELPKRVKSRLSVASDMRFNEIFTEKE
VKQEKKRQRVINSRYREDYIEPALYRAIME
>sp|O75164-2|KDM4A_HUMAN Isoform 2 of Lysine-specific demethylase 4A
OS = Homo sapiens GN = KDM4A
(SEQ ID NO: 2288)
MFSLEENKKSKGRRQPLSKLPRHHPLVLQECVSDDETSEQLTPEEEAEETEAWAKPLSQLWQNRPPNFEAEKEFNETMAQQAPHCAVCMIFQTY
HQVEFGGFNQNCGNASDLAPQKQRTKPLIPEMCFTSTGCSTDINLSTPYLEEDGTSILVSCKKCSVRVHASCYGVPPAKASEDWMCSRCSANAL
EEDCCLCSLRGGALQRANDDRWVHVSCAVAILEARFVNIAERSPVDVSKIPLPRFKLKCIFCKKRRKRTAGCCVQCSHGRCPTAFHVSCAQAAG
VMMQPDDWPFVVFITCFRHKIPNLERAKGALQSITAGQKVISKHKNGRFYQCEVVRLTTETFYEVNFDDGSFSDNLYPEDIVSQDCLQFGPPAE
GEVVQVRWTDGQVYGAKFVASHPIQMYQVEFEDGSQLVVKRDDVYTLDEELPKRVKSRLSVASDMRFNEIFTEKEVKQEKKRQRVINSRYREDY
IEPALYRAIME

[1655] Unless otherwise defined, all technical and scientific terms used herein have the same meaning as commonly understood by one of ordinary skill in the art to which this invention belongs. Although methods and materials similar or equivalent to those described herein can be used in the practice or testing of the present invention, suitable methods and materials are described below. In addition, the materials, methods, and examples are illustrative only and not intended to be limiting.

[1656] Headings, including numeric and alphabetical headings and subheadings, are for organization and presentation and are not intended to be limiting.

### INCORPORATION BY REFERENCE

[1657] All publications, patents, and patent applications mentioned herein are hereby incorporated by reference in their entirety as if each individual publication, patent, or patent application was specifically and individually indicated to be incorporated by reference. In case of conflict, the present application, including any definitions herein, will control.

### EQUIVALENTS

[1658] Those skilled in the art will recognize, or be able to ascertain using no more than routine experimentation, many equivalents to the specific embodiments of the invention described herein. Such equivalents are intended to be encompassed by the following claims.

1. A Cas9 system comprising:
an HDR-enhancer molecule, wherein the enhancer molecule is not an inhibitor of DNA-PK or an inhibitor of Ligase IV,
a Cas9 molecule, and
a gRNA molecule, wherein the gRNA molecule is capable of targeting the Cas9 molecule to a target nucleic acid.

2. The Cas9 system of claim 1, wherein the HDR-enhancer molecule is an HDR-enhancing gRNA, an siRNA, a peptide, an antibody, an miRNA, an antiMiR, or a small molecule.

3. The Cas9 system of claim 1, further comprising a second gRNA molecule, wherein the second gRNA molecule is capable of targeting the Cas9 molecule to the target nucleic acid.

4. A Cas9 system comprising:
a Cas9 nickase molecule,
a gRNA molecule, wherein the gRNA molecule is capable of targeting the Cas9 nickase molecule to a target nucleic acid, and
a second gRNA molecule, wherein the second gRNA molecule is capable of targeting the Cas9 nickase molecule to the target nucleic acid,
wherein the gRNA molecule and the second gRNA molecule are designed to be oriented on the target nucleic acid such that protospacer adjacent motifs (PAMs) are facing out,
wherein the gRNA molecule will position the Cas9 nickase molecule to make a single-strand break in the target nucleic acid which results a 5′ overhang in the target nucleic acid.

5. The Cas9 system of claim 1, further comprising a template nucleic acid.

6.-9. (canceled)

10. The Cas9 system of claim 1, wherein the HDR-enhancer is a down-regulator of HR, a down-regulator of canonical NHEJ, a down-regulator of alt-NHEJ, a down-regulator of an antirecombinant factor, a down-regulator of SSA, a down-regulator of SSBR, a down-regulator of MMR, a chromatin modification agent, a cell cycle arrest compound, an agent capable of promoting resection at a double strand break, a down-regulator of SD-MMEJ, an up-regulator of HDR, or a down-regulator of blunt EJ.

11.-62. (canceled)

63. The Cas9 system of claim 1, which further comprises at least one additional HDR-enhancer molecule.

64.-66. (canceled)

67. The Cas9 system of claim 1, wherein the Cas9 molecule is fused to a transcription activator or a transcription repressor.

68. The Cas9 system of claim 1, wherein the Cas9 molecule is an enzymatically inactive Cas9 molecule (eiCas9) or an enzymatically active Cas9 (eaCas9) molecule.

69.-74. (canceled)

75. The Cas9 system of claim 1, further comprising a second Cas9 molecule.

76.-93. (canceled)

94. The Cas9 system of claim 1 further comprising a cell cycle arrest compound.

95.-96. (canceled)

97. A Cas9 system comprising:
a Cas9 nickase molecule,
a gRNA molecule, wherein the gRNA molecule is capable of targeting the Cas9 nickase molecule to a target nucleic acid, and
a second gRNA molecule, wherein the second gRNA molecule is capable of targeting the Cas9 nickase molecule to the target nucleic acid,
wherein the gRNA molecule and the second gRNA molecule are designed to be oriented on the target nucleic acid such that protospacer adjacent motifs (PAMs) are facing out,
wherein the gRNA molecule will position the Cas9 nickase molecule to make a single-strand break in the target nucleic acid which results a 3′ overhang in the target nucleic acid.

98. A cell comprising the Cas9 system of claim 1.

99. A composition comprising the Cas9 system of claim 1.

100. A pharmaceutical composition comprising the composition of claim 99 and a pharmaceutically acceptable carrier.

101. A kit comprising the Cas9 system of claim 1.

102. (canceled)

103. A vector comprising the Cas9 system of claim 1.

104.-105. (canceled)

106. A reaction mixture comprising the cell of claim 98, and a solution.

107. (canceled)

108. A method of altering the structure of a cell comprising contacting the cell with:
a Cas9 system of claim 1,
under conditions that allow for alteration of the structure of the cell, thereby altering the structure of the cell.

109. (canceled)

110. A method of treating a subject by altering the structure of a cell in the subject, comprising contacting the cell with:
a Cas9 system of claim 1
under conditions that allow for alteration of the structure of the cell, thereby treating the subject by altering the structure of the cell in the subject.

111. A method of promoting DNA repair of a break in a nucleic acid in a cell via an HDR pathway, the method comprising contacting the cell with:
a Cas9 system of claim 1 under conditions that allow for repair of the break in the nucleic acid in the cell via an HDR pathway.

112. A method of promoting DNA repair of a double strand break or two single strand breaks in a target nucleic acid in a cell by an HDR pathway, the method comprising contacting the cell with a gRNA molecule, a Cas9 molecule, and a second gRNA molecule,
wherein the gRNA molecule and the second gRNA molecule are oriented on the target nucleic acid such that protospacer adjacent motifs (PAMs) are facing out,
wherein the Cas9 nickase molecule cuts the target nucleic acid, resulting in a first 5′ overhang and a second 5′ overhang,
thereby promoting DNA repair of the double strand break or the two single strand breaks in the target nucleic acid in the cell via an HDR pathway.

113.-128. (canceled)

129. The method of claim 110, wherein the subject has a disorder that is caused by a mutation in the target nucleic acid.

130.-136. (canceled)

137. A method of producing the Cas9 system of claim 1, the method comprising providing and admixing the gRNA molecule, the Cas9 molecule, and the HDR-enhancer molecule.

138. (canceled)

The application's sequence listing, which the Patent Office published only in electronic form, follows.

SEQUENCE LISTING (2291 sequences)

SEQ ID NO: 1 - RNA, 96 nt, synthetic construct
  misc_feature 1..96: note = Synthetic
  misc_difference 1..20: note = misc_feature - n is a, c, g, or u
  source 1..96: mol_type = other RNA
nnnnnnnnnnnnnnnnnnnngttttagagctagaaatagcaagttaaaataaggctagtccgttatcaacttgaaaaagtggcaccgagtcggtgc

SEQ ID NO: 2 - RNA, 104 nt, synthetic construct
  misc_feature 1..104: note = Synthetic
  misc_difference 1..20: note = misc_feature - n is a, c, g, or u
  source 1..104: mol_type = other RNA
nnnnnnnnnnnnnnnnnnnngttttagagctatgctgaaaagcatagcaagttaaaataaggctagtccgttatcaacttgaaaaagtggcaccgagtcggtgc

SEQ ID NO: 3 - RNA, 106 nt, synthetic construct
  misc_feature 1..106: note = Synthetic
  misc_difference 1..20: note = misc_feature - n is a, c, g, or u
  source 1..106: mol_type = other RNA
nnnnnnnnnnnnnnnnnnnngttttagagctatgctggaaacagcatagcaagttaaaataaggctagtccgttatcaacttgaaaaagtggcaccgagtcggtgc

SEQ ID NO: 4 - RNA, 116 nt, synthetic construct
  misc_feature 1..116: note = Synthetic
  misc_difference 1..20: note = misc_feature - n is a, c, g, or u
  source 1..116: mol_type = other RNA
nnnnnnnnnnnnnnnnnnnngttttagagctatgctgttttggaaacaaaacagcatagcaagttaaaataaggctagtccgttatcaacttgaaaaagtggcaccgagtcggtgc

SEQ ID NO: 5 - RNA, 96 nt, synthetic construct
  misc_feature 1..96: note = Synthetic
  misc_difference 1..20: note = misc_feature - n is a, c, g, or u
  source 1..96: mol_type = other RNA
nnnnnnnnnnnnnnnnnnnngtattagagctagaaatagcaagttaatataaggctagtccgttatcaacttgaaaaagtggcaccgagtcggtgc

SEQ ID NO: 6 - protein, 1053 aa, Staphylococcus aureus
MKRNYILGLDIGITSVGYGIIDYETRDVIDAGVRLFKEANVENNEGRRSKRGARRLKRRRRHRIQRVKKLLFDYNLLTDHSELSGINPYEARVKGLSQKLSEEEFSAALLHLAKRRGVHNVNEVEEDTGNELSTKEQISRNSKALEEKYVAELQLERLKKDGEVRGSINRFKTSDYVKEAKQLLKVQKAYHQLDQSFIDTYIDLLETRRTYYEGPGEGSPFGWKDIKEWYEMLMGHCTYFPEELRSVKYAYNADLYNALNDLNNLVITRDENEKLEYYEKFQIIENVFKQKKKPTLKQIAKEILVNEEDIKGYRVTSTGKPEFTNLKVYHDIKDITARKEIIENAELLDQIAKILTIYQSSEDIQEELTNLNSELTQEEIEQISNLKGYTGTHNLSLKAINLILDELWHTNDNQIAIFNRLKLVPKKVDLSQQKEIPTTLVDDFILSPVVKRSFIQSIKVINAIIKKYGLPNDIIIELAREKNSKDAQKMINEMQKRNRQTNERIEEIIRTTGKENAKYLIEKIKLHDMQEGKCLYSLEAIPLEDLLNNPFNYEVDHIIPRSVSFDNSFNNKVLVKQEENSKKGNRTPFQYLSSSDSKISYETFKKHILNLAKGKGRISKTKKEYLLEERDINRFSVQKDFINRNLVDTRYATRGLMNLLRSYFRVNNLDVKVKSINGGFTSFLRRKWKFKKERNKGYKHHAEDALIIANADFIFKEWKKLDKAKKVMENQMFEEKQAESMPEIETEQEYKEIFITPHQIKHIKDFKDYKYSHRVDKKPNRELINDTLYSTRKDDKGNTLIVNNLNGLYDKDNDKLKKLINKSPEKLLMYHHDPQTYQKLKLIMEQYGDEKNPLYKYYEETGNYLTKYSKKDNGPVIKKIKYYGNKLNAHLDITDDYPNSRNKVVKLSLKPYRFDVYLDNGVYKFVTVKNLDVIKKENYYEVNSKCYEEAKKLKKISNQAEFIASFYNNDLIKINGELYRVIGVNNDLLNRIEVNMIDITYREYLENMNDKRPPRIIKTIASKTQSIKKYSTDILGNLYEVKSKKHPQIIKKG

SEQ ID NO: 7 - protein, 1368 aa, Streptococcus pyogenes [sequence omitted]

SEQ ID NO: 8 - protein, 984 aa, Campylobacter jejuni
  source 1..984: note = NCTC 11168
MARILAFDIGISSIGWAFSENDELKDCGVRIFTKVENPKTGESLALPRRLARSARKRLARRKARLNHLKHLIANEFKLNYEDYQSFDESLAKAYKGSLISPYELRFRALNELLSKQDFARVILHIAKRRGYDDIKNSDDKEKGAILKAIKQNEEKLANYQSVGEYLYKEYFQKFKENSKEFTNVRNKKESYERCIAQSFLKDELKLIFKKQREFGFSFSKKFEEEVLSVAFYKRALKDFSHLVGNCSFFTDEKRAPKNSPLAFMFVALTRIINLLNNLKNTEGILYTKDDLNALLNEVLKNGTLTYKQTKKLLGLSDDYEFKGEKGTYFIEFKKYKEFIKALGEHNLSQDDLNEIAKDITLIKDEIKLKKALAKYDLNQNQIDSLSKLEFKDHLNISFKALKLVTPLMLEGKKYDEACNELNLKVAINEDKKDFLPAFNETYYKDEVTNPVVLRAIKEYRKVLNALLKKYGKVHKINIELAREVGKNHSQRAKIEKEQNENYKAKKDAELECEKLGLKINSKNILKLRLFKEQKEFCAYSGEKIKISDLQDEKMLEIDHIYPYSRSFDDSYMNKVLVFTKQNQEKLNQTPFEAFGNDSAKWQKIEVLAKNLPTKKQKRILDKNYKDKEQKNFKDRNLNDTRYIARLVLNYTKDYLDFLPLSDDENTKLNDTQKGSKVHVEAKSGMLTSALRHTWGFSAKDRNNHLHHAIDAVIIAYANNSIVKAFSDFKKEQESNSAELYAKKISELDYKNKRKFFEPFSGFRQKVLDKIDEIFVSKPERKKPSGALHEETFRKEEEFYQSYGGKEGVLKALELGKIRKVNGKIVKNGDMFRVDIFKHKKTNKFYAVPIYTMDFALKVLPNKAVARSKKGEIKDWILMDENYEFCFSLYKDSLILIQTKDMQEPEFVYYNAFTSSTVSLIVSKHDNKFETLSKNQKILFKNANEKEVIAKSIGIQNLKVFEKYIVSALGEVTKAEFRQREDFKK

SEQ ID NO: 9 - protein, 1436 aa, Bacteroides fragilis
  source 1..1436: note = NCTC 9343
MKRILGLDLGTNSIGWALVNEAENKDERSSIVKLGVRVNPLTVDELTNFEKGKSITTNADRTLKRGMRRNLQRYKLRRETLTEVLKEHKLITEDTILSENGNRTTFETYRLRAKAVTEEISLEEFARVLLMINKKRGYKSSRKAKGVEEGTLIDGMDIARELYNNNLTPGELCLQLLDAGKKFLPDFYRSDLQNELDRIWEKQKEYYPEILTDVLKEELRGKKRDAVWAICAKYFVWKENYTEWNKEKGKTEQQEREHKLEGIYSKRKRDEAKRENLQWRVNGLKEKLSLEQLVIVFQEMNTQINNSSGYLGAISDRSKELYFNKQTVGQYQMEMLDKNPNASLRNMVFYRQDYLDEFNMLWEKQAVYHKELTEELKKEIRDIIIFYQRRLKSQKGLIGFCEFESRQIEVDIDGKKKIKTVGNRVISRSSPLFQEFKIWQILNNIEVTVVGKKRKRRKLKENYSALFEELNDAEQLELNGSRRLCQEEKELLAQELFIRDKMTKSEVLKLLFDNPQELDLNFKTIDGNKTGYALFQAYSKMIEMSGHEPVDFKKPVEKVVEYIKAVFDLLNWNTDILGFNSNEELDNQPYYKLWHLLYSFEGDNTPTGNGRLIQKMTELYGFEKEYATILANVSFQDDYGSLSAKAIHKILPHLKEGNRYDVACVYAGYRHSESSLTREEIANKVLKDRLMLLPKNSLHNPVVEKILNQMVNVINVIIDIYGKPDEIRVELARELKKNAKEREELTKSIAQTTKAHEEYKTLLQTEFGLTNVSRTDILRYKLYKELESCGYKTLYSNTYISREKLFSKEFDIEHIIPQARLFDDSFSNKTLEARSVNIEKGNKTAYDFVKEKFGESGADNSLEHYLNNIEDLFKSGKISKTKYNKLKMAEQDIPDGFIERDLRNTQYIAKKALSMLNEISHRVVATSGSVTDKLREDWQLIDVMKELNWEKYKALGLVEYFEDRDGRQIGRIKDWTKRNDHRHHAMDALTVAFTKDVFIQYFNNKNASLDPNANEHAIKNKYFQNGRAIAPMPLREFRAEAKKHLENTLISIKAKNKVITGNINKTRKKGGVNKNMQQTPRGQLHLETIYGSGKQYLTKEEKVNASFDMRKIGTVSKSAYRDALLKRLYENDNDPKKAFAGKNSLDKQPIWLDKEQMRKVPEKVKIVTLEAIYTIRKEISPDLKVDKVIDVGVRKILIDRLNEYGNDAKKAFSNLDKNPIWLNKEKGISIKRVTISGISNAQSLHVKKDKDGKPILDENGRNIPVDFVNTGNNHHVAVYYRPVIDKRGQLVVDEAGNPKYELEEVVVSFFEAVTRANLGLPIIDKDYKTTEGWQFLFSMKQNEYFVFPNEKTGFNPKEIDLLDVENYGLISPNLFRVQKFSLKNYVFRHHLETTIKDTSSILRGITWIDFRSSKGLDTIVKVRVNHIGQIVSVGEY

SEQ ID NO: 10 - protein, 1420 aa, Bifidobacterium bifidum
  source 1..1420: note = S17
MSRKNYVDDYAISLDIGNASVGWSAFTPNYRLVRAKGHELIGVRLFDPADTAESRRMARTTRRRYSRRRWRLRLLDALFDQALSEIDPSFLARRKYSWVHPDDENNADCWYGSVLFDSNEQDKRFYEKYPTIYHLRKALMEDDSQHDIREIYLAIHHMVKYRGNFLVEGTLESSNAFKEDELLKLLGRITRYEMSEGEQNSDIEQDDENKLVAPANGQLADALCATRGSRSMRVDNALEALSAVNDLSREQRAIVKAIFAGLEGNKLDLAKIFVSKEFSSENKKILGIYFNKSDYEEKCVQIVDSGLLDDEEREFLDRMQGQYNAIALKQLLGRSTSVSDSKCASYDAHRANWNLIKLQLRTKENEKDINENYGILVGWKIDSGQRKSVRGESAYENMRKKANVFFKKMIETSDLSETDKNRLIHDIEEDKLFPIQRDSDNGVIPHQLHQNELKQIIKKQGKYYPFLLDAFEKDGKQINKIEGLLTFRVPYFVGPLVVPEDLQKSDNSENHWMVRKKKGEITPWNFDEMVDKDASGRKFIERLVGTDSYLLGEPTLPKNSLLYQEYEVLNELNNVRLSVRTGNHWNDKRRMRLGREEKTLLCQRLFMKGQTVTKRTAENLLRKEYGRTYELSGLSDESKFTSSLSTYGKMCRIFGEKYVNEHRDLMEKIVELQTVFEDKETLLHQLRQLEGISEADCALLVNTHYTGWGRLSRKLLTTKAGECKISDDFAPRKHSIIEIMRAEDRNLMEIITDKQLGFSDWIEQENLGAENGSSLMEVVDDLRVSPKVKRGIIQSIRLIDDISKAVGKRPSRIFLELADDIQPSGRTISRKSRLQDLYRNANLGKEFKGIADELNACSDKDLQDDRLFLYYTQLGKDMYTGEELDLDRLSSAYDIDHIIPQAVTQNDSIDNRVLVARAENARKTDSFTYMPQIADRMRNFWQILLDNGLISRVKFERLTRQNEFSEREKERFVQRSLVETRQIMKNVATLMRQRYGNSAAVIGLNAELTKEMHRYLGFSHKNRDINDYHHAQDALCVGIAGQFAANRGFFADGEVSDGAQNSYNQYLRDYLRGYREKLSAEDRKQGRAFGFIVGSMRSQDEQKRVNPRTGEVVWSEEDKDYLRKVMNYRKMLVTQKVGDDFGALYDETRYAATDPKGIKGIPFDGAKQDTSLYGGFSSAKPAYAVLIESKGKTRLVNVTMQEYSLLGDRPSDDELRKVLAKKKSEYAKANILLRHVPKMQLIRYGGGLMVIKSAGELNNAQQLWLPYEEYCYFDDLSQGKGSLEKDDLKKLLDSILGSVQCLYPWHRFTEEELADLHVAFDKLPEDEKKNVITGIVSALHADAKTANLSIVGMTGSWRRMNNKSGYTFSDEDEFIFQSPSGLFEKRVTVGELKRKAKKEVNSKYRTNEKRLPTLSGASQP

SEQ ID NO: 11 - protein, 1397 aa, Veillonella atypica
  source 1..1397: note = ACS134VCol7a
METQTSNQLITSHLKDYPKQDYFVGLDIGTNSVGWAVTNTSYELLKFHSHKMWGSRLFEEGESAVTRRGFRSMRRRLERRKLRLKLLEELFADAMAQVDSTFFIRLHESKYHYEDKTTGHSSKHILFIDEDYTDQDYFTEYPTIYHLRKDLMENGTDDIRKLFLAVHHILKYRGNFLYEGATFNSNAFTFEDVLKQALVNITFNCFDTNSAISSISNILMESGKTKSDKAKAIERLVDTYTVFDEVNTPDKPQKEQVKEDKKTLKAFANLVLGLSANLIDLFGSVEDIDDDLKKLQIVGDTYDEKRDELAKVWGDEIHIIDDCKSVYDAIILMSIKEPGLTISQSKVKAFDKHKEDLVILKSLLKLDRNVYNEMFKSDKKGLHNYVHYIKQGRTEETSCSREDFYKYTKKIVEGLADSKDKEYILNEIELQTLLPLQRIKDNGVIPYQLHLEELKVILDKCGPKFPFLHTVSDGFSVTEKLIKMLEFRIPYYVGPLNTHHNIDNGGFSWAVRKQAGRVTPWNFEEKIDREKSAAAFIKNLTNKCTYLFGEDVLPKSSLLYSEFMLLNELNNVRIDGKALAQGVKQHLIDSIFKQDHKKMTKNRIELFLKDNNYITKKHKPEITGLDGEIKNDLTSYRDMVRILGNNFDVSMAEDIITDITIFGESKKMLRQTLRNKFGSQLNDETIKKLSKLRYRDWGRLSKKLLKGIDGCDKAGNGAPKTIIELMRNDSYNLMEILGDKFSFMECIEEENAKLAQGQVVNPHDIIDELALSPAVKRAVWQALRIVDEVAHIKKALPSRIFVEVARTNKSEKKKKDSRQKRLSDLYSAIKKDDVLQSGLQDKEFGALKSGLANYDDAALRSKKLYLYYTQMGRCAYTGNIIDLNQLNTDNYDIDHIYPRSLTKDDSFDNLVLCERTANAKKSDIYPIDNRIQTKQKPFWAFLKHQGLISERKYERLTRIAPLTADDLSGFIARQLVETNQSVKATTTLLRRLYPDIDVVFVKAENVSDFRHNNNFIKVRSLNHHHHAKDAYLNIVVGNVYHEKFTRNFRLFFKKNGANRTYNLAKMFNYDVICTNAQDGKAWDVKTSMNTVKKMMASNDVRVTRRLLEQSGALADATIYKASVAAKAKDGAYIGMKTKYSVFADVTKYGGMTKIKNAYSIIVQYTGKKGEEIKEIVPLPIYLINRNATDIELIDYVKSVIPKAKDISIKYRKLCINQLVKVNGFYYYLGGKTNDKIYIDNAIELVVPHDIATYIKLLDKYDLLRKENKTLKASSITTSIYNINTSTVVSLNKVGIDVFDYFMSKLRTPLYMKMKGNKVDELSSTGRSKFIKMTLEEQSIYLLEVLNLLTNSKTTFDVKPLGITGSRSTIGVKIHNLDEFKIINESITGLYSNEVTIV

SEQ ID NO: 12 - protein, 1363 aa, Lactobacillus rhamnosus
  source 1..1363: note = GG
MTKLNQPYGIGLDIGSNSIGFAVVDANSHLLRLKGETAIGARLFREGQSAADRRGSRTTRRRLSRTRWRLSFLRDFFAPHITKIDPDFFLRQKYSEISPKDKDRFKYEKRLFNDRTDAEFYEDYPSMYHLRLHLMTHTHKADPREIFLAIHHILKSRGHFLTPGAAKDFNTDKVDLEDIFPALTEAYAQVYPDLELTFDLAKADDFKAKLLDEQATPSDTQKALVNLLLSSDGEKEIVKKRKQVLTEFAKAITGLKTKFNLALGTEVDEADASNWQFSMGQLDDKWSNIETSMTDQGTEIFEQIQELYRARLLNGIVPAGMSLSQAKVADYGQHKEDLELFKTYLKKLNDHELAKTIRGLYDRYINGDDAKPFLREDFVKALTKEVTAHPNEVSEQLLNRMGQANFMLKQRTKANGAIPIQLQQRELDQIIANQSKYYDWLAAPNPVEAHRWKMPYQLDELLNFHIPYYVGPLITPKQQAESGENVFAWMVRKDPSGNITPYNFDEKVDREASANTFIQRMKTTDTYLIGEDVLPKQSLLYQKYEVLNELNNVRINNECLGTDQKQRLIREVFERHSSVTIKQVADNLVAHGDFARRPEIRGLADEKRFLSSLSTYHQLKEILHEAIDDPTKLLDIENIITWSTVFEDHTIFETKLAEIEWLDPKKINELSGIRYRGWGQFSRKLLDGLKLGNGHTVIQELMLSNHNLMQILADETLKETMTELNQDKLKTDDIEDVINDAYTSPSNKKALRQVLRVVEDIKHAANGQDPSWLFIETADGTGTAGKRTQSRQKQIQTVYANAAQELIDSAVRGELEDKIADKASFTDRLVLYFMQGGRDIYTGAPLNIDQLSHYDIDHILPQSLIKDDSLDNRVLVNATINREKNNVFASTLFAGKMKATWRKWHEAGLISGRKLRNLMLRPDEIDKFAKGFVARQLVETRQIIKLTEQIAAAQYPNTKIIAVKAGLSHQLREELDFPKNRDVNHYHHAFDAFLAARIGTYLLKRYPKLAPFFTYGEFAKVDVKKFREFNFIGALTHAKKNIIAKDTGEIVWDKERDIRELDRIYNFKRMLITHEVYFETADLFKQTIYAAKDSKERGGSKQLIPKKQGYPTQVYGGYTQESGSYNALVRVAEADTTAYQVIKISAQNASKIASANLKSREKGKQLLNEIVVKQLAKRRKNWKPSANSFKIVIPRFGMGTLFQNAKYGLFMVNSDTYYRNYQELWLSRENQKLLKKLFSIKYEKTQMNHDALQVYKAIIDQVEKFFKLYDINQFRAKLSDAIERFEKLPINTDGNKIGKTETLRQILIGLQANGTRSNVKNLGIKTDLGLLQVGSGIKLDKDTQIVYQSPSGLFKRRIPLADL

SEQ ID NO: 13 - protein, 1365 aa, Filifactor alocis
  source 1..1365: note = ATCC 35896
MTKEYYLGLDVGTNSVGWAVTDSQYNLCKFKKKDMWGIRLFESANTAKDRRLQRGNRRRLERKKQRIDLLQEIFSPEICKIDPTFFIRLNESRLHLEDKSNDFKYPLFIEKDYSDIEYYKEFPTIFHLRKHLIESEEKQDIRLIYLALHNIIKTRGHFLIDGDLQSAKQLRPILDTFLLSLQEEQNLSVSLSENQKDEYEEILKNRSIAKSEKVKKLKNLFEISDELEKEEKKAQSAVIENFCKFIVGNKGDVCKFLRVSKEELEIDSFSFSEGKYEDDIVKNLEEKVPEKVYLFEQMKAMYDWNILVDILETEEYISFAKVKQYEKHKTNLRLLRDIILKYCTKDEYNRMFNDEKEAGSYTAYVGKLKKNNKKYWIEKKRNPEEFYKSLGKLLDKIEPLKEDLEVLTMMIEECKNHTLLPIQKNKDNGVIPHQVHEVELKKILENAKKYYSFLTETDKDGYSVVQKIESIFRFRIPYYVGPLSTRHQEKGSNVWMVRKPGREDRIYPWNMEEIIDFEKSNENFITRMTNKCTYLIGEDVLPKHSLLYSKYMVLNELNNVKVRGKKLPTSLKQKVFEDLFENKSKVTGKNLLEYLQIQDKDIQIDDLSGFDKDFKTSLKSYLDFKKQIFGEEIEKESIQNMIEDIIKWITIYGNDKEMLKRVIRANYSNQLTEEQMKKITGFQYSGWGNFSKMFLKGISGSDVSTGETFDIITAMWETDNNLMQILSKKFTFMDNVEDFNSGKVGKIDKITYDSTVKEMFLSPENKRAVWQTIQVAEEIKKVMGCEPKKIFIEMARGGEKVKKRTKSRKAQLLELYAACEEDCRELIKEIEDRDERDFNSMKLFLYYTQFGKCMYSGDDIDINELIRGNSKWDRDHIYPQSKIKDDSIDNLVLVNKTYNAKKSNELLSEDIQKKMHSFWLSLLNKKLITKSKYDRLTRKGDFTDEELSGFIARQLVETRQSTKAIADIFKQIYSSEVVYVKSSLVSDFRKKPLNYLKSRRVNDYHHAKDAYLNIVVGNVYNKKFTSNPIQWMKKNRDTNYSLNKVFEHDVVINGEVIWEKCTYHEDTNTYDGGTLDRIRKIVERDNILYTEYAYCEKGELFNATIQNKNGNSTVSLKKGLDVKKYGGYFSANTSYFSLIEFEDKKGDRARHIIGVPIYIANMLEHSPSAFLEYCEQKGYQNVRILVEKIKKNSLLIINGYPLRIRGENEVDTSFKRAIQLKLDQKNYELVRNIEKFLEKYVEKKGNYPIDENRDHITHEKMNQLYEVLLSKMKKFNKKGMADPSDRIEKSKPKFIKLEDLIDKINVINKMLNLLRCDNDTKADLSLIELPKNAGSFVVKKNTIGKSKIILVNQSVTGLYENRREL

SEQ ID NO: 14 - protein, 1389 aa, Oenococcus kitaharae
  source 1..1389: note = DSM 17330
MARDYSVGLDIGTSSVGWAAIDNKYHLIRAKSKNLIGVRLFDSAVTAEKRRGYRTTRRRLSRRHWRLRLLNDIFAGPLTDFGDENFLARLKYSWVHPQDQSNQAHFAAGLLFDSKEQDKDFYRKYPTIYHLRLALMNDDQKHDLREVYLAIHHLVKYRGHFLIEGDVKADSAFDVHTFADAIQRYAESNNSDENLLGKIDEKKLSAALTDKHGSKSQRAETAETAFDILDLQSKKQIQAILKSVVGNQANLMAIFGLDSSAISKDEQKNYKFSFDDADIDEKIADSEALLSDTEFEFLCDLKAAFDGLTLKMLLGDDKTVSAAMVRRFNEHQKDWEYIKSHIRNAKNAGNGLYEKSKKFDGINAAYLALQSDNEDDRKKAKKIFQDEISSADIPDDVKADFLKKIDDDQFLPIQRTKNNGTIPHQLHRNELEQIIEKQGIYYPFLKDTYQENSHELNKITALINFRVPYYVGPLVEEEQKIADDGKNIPDPTNHWMVRKSNDTITPWNLSQVVDLDKSGRRFIERLTGTDTYLIGEPTLPKNSLLYQKFDVLQELNNIRVSGRRLDIRAKQDAFEHLFKVQKTVSATNLKDFLVQAGYISEDTQIEGLADVNGKNFNNALTTYNYLVSVLGREFVENPSNEELLEEITELQTVFEDKKVLRRQLDQLDGLSDHNREKLSRKHYTGWGRISKKLLTTKIVQNADKIDNQTFDVPRMNQSIIDTLYNTKMNLMEIINNAEDDFGVRAWIDKQNTTDGDEQDVYSLIDELAGPKEIKRGIVQSFRILDDITKAVGYAPKRVYLEFARKTQESHLTNSRKNQLSTLLKNAGLSELVTQVSQYDAAALQNDRLYLYFLQQGKDMYSGEKLNLDNLSNYDIDHIIPQAYTKDNSLDNRVLVSNITNRRKSDSSNYLPALIDKMRPFWSVLSKQGLLSKHKFANLTRTRDFDDMEKERFIARSLVETRQIIKNVASLIDSHFGGETKAVAIRSSLTADMRRYVDIPKNRDINDYHHAFDALLFSTVGQYTENSGLMKKGQLSDSAGNQYNRYIKEWIHAARLNAQSQRVNPFGFVVGSMRNAAPGKLNPETGEITPEENADWSIADLDYLHKVMNFRKITVTRRLKDQKGQLYDESRYPSVLHDAKSKASINFDKHKPVDLYGGFSSAKPAYAALIKFKNKFRLVNVLRQWTYSDKNSEDYILEQIRGKYPKAEMVLSHIPYGQLVKKDGALVTISSATELHNFEQLWLPLADYKLINTLLKTKEDNLVDILHNRLDLPEMTIESAFYKAFDSILSFAFNRYALHQNALVKLQAHRDDFNALNYEDKQQTLERILDALHASPASSDLKKINLSSGFGRLFSPSHFTLADTDEFIFQSVTGLFSTQKTVAQLYQETK

SEQ ID NO: 15 - protein, 1323 aa, Fructobacillus fructosus
  source 1..1323: note = KCTC 3544
MVYDVGLDIGTGSVGWVALDENGKLARAKGKNLVGVRLFDTAQTAADRRGFRTTRRRLSRRKWRLRLLDELFSAEINEIDSSFFQRLKYSYVHPKDEENKAHYYGGYLFPTEEETKKFHRSYPTIYHLRQELMAQPNKRFDIREIYLAIHHLVKYRGHFLSSQEKITIGSTYNPEDLANAIEVYADEKGLSWELNNPEQLTEIISGEAGYGLNKSMKADEALKLFEFDNNQDKVAIKTLLAGLTGNQIDFAKLFGKDISDKDEAKLWKLKLDDEALEEKSQTILSQLTDEEIELFHAVVQAYDGFVLIGLLNGADSVSAAMVQLYDQHREDRKLLKSLAQKAGLKHKRFSEIYEQLALATDEATIKNGISTARELVEESNLSKEVKEDTLRRLDENEFLPKQRTKANSVIPHQLHLAELQKILQNQGQYYPFLLDTFEKEDGQDNKIEELLRFRIPYYVGPLVTKKDVEHAGGDADNHWVERNEGFEKSRVTPWNFDKVFNRDKAARDFIERLTGNDTYLIGEKTLPQNSLRYQLFTVLNELNNVRVNGKKFDSKTKADLINDLFKARKTVSLSALKDYLKAQGKGDVTITGLADESKFNSSLSSYNDLKKTFDAEYLENEDNQETLEKIIEIQTVFEDSKIASRELSKLPLDDDQVKKLSQTHYTGWGRLSEKLLDSKIIDERGQKVSILDKLKSTSQNFMSIINNDKYGVQAWITEQNTGSSKLTFDEKVNELTTSPANKRGIKQSFAVLNDIKKAMKEEPRRVYLEFAREDQTSVRSVPRYNQLKEKYQSKSLSEEAKVLKKTLDGNKNKMSDDRYFLYFQQQGKDMYTGRPINFERLSQDYDIDHIIPQAFTKDDSLDNRVLVSRPENARKSDSFAYTDEVQKQDGSLWTSLLKSGFINRKKYERLTKAGKYLDGQKTGFIARQLVETRQIIKNVASLIEGEYENSKAVAIRSEITADMRLLVGIKKHREINSFHHAFDALLITAAGQYMQNRYPDRDSTNVYNEFDRYTNDYLKNLRQLSSRDEVRRLKSFGFVVGTMRKGNEDWSEENTSYLRKVMMFKNILTTKKTEKDRGPLNKETIFSPKSGKKLIPLNSKRSDTALYGGYSNVYSAYMTLVRANGKNLLIKIPISIANQIEVGNLKINDYIVNNPAIKKFEKILISKLPLGQLVNEDGNLIYLASNEYRHNAKQLWLSTTDADKIASISENSSDEELLEAYDILTSENVKNRFPFFKKDIDKLSQVRDEFLDSDKRIAVIQTILRGLQIDAAYQAPVKIISKKVSDWHKLQQSGGIKLSDNSEMIYQSATGIFETRVKISDLL

SEQ ID NO: 16 - protein, 1329 aa, Catenibacterium mitsuokai
  source 1..1329: note = DSM 15897
IVDYCIGLDLGTGSVGWAVVDMNHRLMKRNGKHLWGSRLFSNAETAANRRASRSIRRRYNKRRERIRLLRAILQDMVLEKDPTFFIRLEHTSFLDEEDKAKYLGTDYKDNYNLFIDEDFNDYTYYHKYPTIYHLRKALCESTEKADPRLIYLALHHIVKYRGNFLYEGQKFNMDASNIEDKLSDIFTQFTSFNNIPYEDDEKKNLEILEILKKPLSKKAKVDEVMTLIAPEKDYKSAFKELVTGIAGNKMNVTKMILCEPIKQGDSEIKLKFSDSNYDDQFSEVEKDLGEYVEFVDALHNVYSWVELQTIMGATHTDNASISEAMVSRYNKHHDDLKLLKDCIKNNVPNKYFDMFRNDSEKSKGYYNYINRPSKAPVDEFYKYVKKCIEKVDTPEAKQILNDIELENFLLKQNSRTNGSVPYQMQLDEMIKIIDNQAEYYPILKEKREQLLSILTFRIPYYFGPLNETSEHAWIKRLEGKENQRILPWNYQDIVDVDATAEGFIKRMRSYCTYFPDEEVLPKNSLIVSKYEVYNELNKIRVDDKLLEVDVKNDIYNELFMKNKTVTEKKLKNWLVNNQCCSKDAEIKGFQKENQFSTSLTPWIDFTNIFGKIDQSNFDLIENIIYDLTVFEDKKIMKRRLKKKYALPDDKVKQILKLKYKDWSRLSKKLLDGIVADNRFGSSVTVLDVLEMSRLNLMEIINDKDLGYAQMIEEATSCPEDGKFTYEEVERLAGSPALKRGIWQSLQIVEEITKVMKCRPKYIYIEFERSEEAKERTESKIKKLENVYKDLDEQTKKEYKSVLEELKGFDNTKKISSDSLFLYFTQLGKCMYSGKKLDIDSLDKYQIDHIVPQSLVKDDSFDNRVLVVPSENQRKLDDLVVPFDIRDKMYRFWKLLFDHELISPKKFYSLIKTEYTERDEERFINRQLVETRQITKNVTQIIEDHYSTTKVAAIRANLSHEFRVKNHIYKNRDINDYHHAHDAYIVALIGGFMRDRYPNMHDSKAVYSEYMKMFRKNKNDQKRWKDGFVINSMNYPYEVDGKLIWNPDLINEIKKCFYYKDCYCTTKLDQKSGQLFNLTVLSNDAHADKGVTKAVVPVNKNRSDVHKYGGFSGLQYTIVAIEGQKKKGKKTELVKKISGVPLHLKAASINEKINYIEEKEGLSDVRIIKDNIPVNQMIEMDGGEYLLTSPTEYVNARQLVLNEKQCALIADIYNAIYKQDYDNLDDILMIQLYIELTNKMKVLYPAYRGIAEKFESMNENYVVISKEEKANIIKQMLIVMHRGPQNGNIVYDDFKISDRIGRLKTKNHNLNNIVFISQSPTGIYTKKYKL

SEQ ID NO: 17 - protein, 1348 aa, Finegoldia magna
  source 1..1348: note = ATCC 29328
MKSEKKYYIGLDVGTNSVGWAVTDEFYNILRAKGKDLWGVRLFEKADTAANTRIFRSGRRRNDRKGMRLQILREIFEDEIKKVDKDFYDRLDESKFWAEDKKVSGKYSLFNDKNFSDKQYFEKFPTIFHLRKYLMEEHGKVDIRYYFLAINQMMKRRGHFLIDGQISHVTDDKPLKEQLILLINDLLKIELEEELMDSIFEILADVNEKRTDKKNNLKELIKGQDFNKQEGNILNSIFESIVTGKAKIKNIISDEDILEKIKEDNKEDFVLTGDSYEENLQYFEEVLQENITLFNTLKSTYDFLILQSILKGKSTLSDAQVERYDEHKKDLEILKKVIKKYDEDGKLFKQVFKEDNGNGYVSYIGYYLNKNKKITAKKKISNIEFTKYVKGILEKQCDCEDEDVKYLLGKIEQENFLLKQISSINSVIPHQIHLFELDKILENLAKNYPSFNNKKEEFTKIEKIRKTFTFRIPYYVGPLNDYHKNNGGNAWIFRNKGEKIRPWNFEKIVDLHKSEEEFIKRMLNQCTYLPEETVLPKSSILYSEYMVLNELNNLRINGKPLDTDVKLKLIEELFKKKTKVTLKSIRDYMVRNNFADKEDFDNSEKNLEIASNMKSYIDFNNILEDKFDVEMVEDLIEKITIHTGNKKLLKKYIEETYPDLSSSQIQKIINLKYKDWGRLSRKLLDGIKGTKKETEKTDTVINFLRNSSDNLMQIIGSQNYSFNEYIDKLRKKYIPQEISYEVVENLYVSPSVKKMIWQVIRVTEEITKVMGYDPDKIFIEMAKSEEEKKTTISRKNKLLDLYKAIKKDERDSQYEKLLTGLNKLDDSDLRSRKLYLYYTQMGRDMYTGEKIDLDKLFDSTHYDKDHIIPQSMKKDDSIINNLVLVNKNANQTTKGNIYPVPSSIRNNPKIYNYWKYLMEKEFISKEKYNRLIRNTPLTNEELGGFINRQLVETRQSTKAIKELFEKFYQKSKIIPVKASLASDLRKDMNTLKSREVNDLHHAHDAFLNIVAGDVWNREFTSNPINYVKENREGDKVKYSLSKDFTRPRKSKGKVIWTPEKGRKLIVDTLNKPSVLISNESHVKKGELFNATIAGKKDYKKGKIYLPLKKDDRLQDVSKYGGYKAINGAFFFLVEHTKSKKRIRSIELFPLHLLSKFYEDKNTVLDYAINVLQLQDPKIIIDKINYRTEIIIDNFSYLISTKSNDGSITVKPNEQMYWRVDEISNLKKIENKYKKDAILTEEDRKIMESYIDKIYQQFKAGKYKNRRTTDTIIEKYEIIDLDTLDNKQLYQLLVAFISLSYKTSNNAVDFTVIGLGTECGKPRITNLPDNTYLVYKSITGIYEKRIRIK

SEQ ID NO: 18 - protein, 1384 aa, unidentified
  source 1..1384: note = CoriobacteriumglomeransPW2
MKLRGIEDDYSIGLDMGTSSVGWAVTDERGTLAHFKRKPTWGSRLFREAQTAAVARMPRGQRRRYVRRRWRLDLLQKLFEQQMEQADPDFFIRLRQSRLLRDDRAEEHADYRWPLFNDCKFTERDYYQRFPTIYHVRSWLMETDEQADIRLIYLALHNIVKHRGNFLREGQSLSAKSARPDEALNHLRETLRVWSSERGFECSIADNGSILAMLTHPDLSPSDRRKKIAPLFDVKSDDAAADKKLGIALAGAVIGLKTEFKNIFGDFPCEDSSIYLSNDEAVDAVRSACPDDCAELFDRLCEVYSAYVLQGLLSYAPGQTISANMVEKYRRYGEDLALLKKLVKIYAPDQYRMFFSGATYPGTGIYDAAQARGYTKYNLGPKKSEYKPSESMQYDDFRKAVEKLFAKTDARADERYRMMMDRFDKQQFLRRLKTSDNGSIYHQLHLEELKAIVENQGRFYPFLKRDADKLVSLVSFRIPYYVGPLSTRNARTDQHGENRFAWSERKPGMQDEPIFPWNWESIIDRSKSAEKFILRMTGMCTYLQQEPVLPKSSLLYEEFCVLNELNGAHWSIDGDDEHRFDAADREGIIEELFRRKRTVSYGDVAGWMERERNQIGAHVCGGQGEKGFESKLGSYIFFCKDVFKVERLEQSDYPMIERIILWNTLFEDRKILSQRLKEEYGSRLSAEQIKTICKKRFTGWGRLSEKFLTGITVQVDEDSVSIMDVLREGCPVSGKRGRAMVMMEILRDEELGFQKKVDDFNRAFFAENAQALGVNELPGSPAVRRSLNQSIRIVDEIASIAGKAPANIFIEVTRDEDPKKKGRRTKRRYNDLKDALEAFKKEDPELWRELCETAPNDMDERLSLYFMQRGKCLYSGRAIDIHQLSNAGIYEVDHIIPRTYVKDDSLENKALVYREENQRKTDMLLIDPEIRRRMSGYWRMLHEAKLIGDKKFRNLLRSRIDDKALKGFIARQLVETGQMVKLVRSLLEARYPETNIISVKASISHDLRTAAELVKCREANDFHHAHDAFLACRVGLFIQKRHPCVYENPIGLSQVVRNYVRQQADIFKRCRTIPGSSGFIVNSFMTSGFDKETGEIFKDDWDAEAEVEGIRRSLNFRQCFISRMPFEDHGVFWDATIYSPRAKKTAALPLKQGLNPSRYGSFSREQFAYFFIYKARNPRKEQTLFEFAQVPVRLSAQIRQDENALERYARELAKDQGLEFIRIERSKILKNQLIEIDGDRLCITGKEEVRNACELAFAQDEMRVIRMLVSEKPVSRECVISLFNRILLHGDQASRRLSKQLKLALLSEAFSEASDNVQRNVVLGLIAIFNGSTNMVNLSDIGGSKFAGNVRIKYKKELASPKVNVHLIDQSVTGMFERRTKIGL

SEQ ID NO: 19 - protein, 1391 aa, Eubacterium yurii
  source 1..1391: note = ATCC 43715
MENKQYYIGLDVGTNSVGWAVTDTSYNLLRAKGKDMWGARLFEKANTAAERRTKRTSRRRSEREKARKAMLKELFADEINRVDPSFFIRLEESKFFLDDRSENNRQRYTLFNDATFTDKDYYEKYKTIFHLRSALINSDEKFDVRLVFLAILNLFSHRGHFLNASLKGDGDIQGMDVFYNDLVESCEYFEIELPRITNIDNFEKILSQKGKSRTKILEELSEELSISKKDKSKYNLIKLISGLEASVVELYNIEDIQDENKKIKIGFRESDYEESSLKVKEIIGDEYFDLVERAKSVHDMGLLSNIIGNSKYLCEARVEAYENHHKDLLKIKELLKKYDKKAYNDMFRKMTDKNYSAYVGSVNSNIAKERRSVDKRKIEDLYKYIEDTALKNIPDDNKDKIEILEKIKLGEFLKKQLTASNGVIPNQLQSRELRAILKKAENYLPFLKEKGEKNLTVSEMIIQLFEFQIPYYVGPLDKNPKKDNKANSWAKIKQGGRILPWNFEDKVDVKGSRKEFIEKMVRKCTYISDEHTLPKQSLLYEKFMVLNEINNIKIDGEKISVEAKQKIYNDLFVKGKKVSQKDIKKELISLNIMDKDSVLSGTDTVCNAYLSSIGKFTGVFKEEINKQSIVDMIEDIIFLKTVYGDEKRFVKEEIVEKYGDEIDKDKIKRILGFKFSNWGNLSKSFLELEGADVGTGEVRSIIQSLWETNFNLMELLSSRFTYMDELEKRVKKLEKPLSEWTIEDLDDMYLSSPVKRMIWQSMKIVDEIQTVIGYAPKRIFVEMTRSEGEKVRTKSRKDRLKELYNGIKEDSKQWVKELDSKDESYFRSKKMYLYYLQKGRCMYSGEVIELDKLMDDNLYDIDHIYPRSFVKDDSLDNLVLVKKEINNRKQNDPITPQIQASCQGFWKILHDQGFMSNEKYSRLTRKTQEFSDEEKLSFINRQIVETGQATKCMAQILQKSMGEDVDVVFSKARLVSEFRHKFELFKSRLINDFHHANDAYLNIVVGNSYFVKFTRNPANFIKDARKNPDNPVYKYHMDRFFERDVKSKSEVAWIGQSEGNSGTIVIVKKTMAKNSPLITKKVEEGHGSITKETIVGVKEIKFGRNKVEKADKTPKKPNLQAYRPIKTSDERLCNILRYGGRTSISISGYCLVEYVKKRKTIRSLEAIPVYLGRKDSLSEEKLLNYFRYNLNDGGKDSVSDIRLCLPFISTNSLVKIDGYLYYLGGKNDDRIQLYNAYQLKMKKEEVEYIRKIEKAVSMSKFDEIDREKNPVLTEEKNIELYNKIQDKFENTVFSKRMSLVKYNKKDLSFGDFLKNKKSKFEEIDLEKQCKVLYNIIFNLSNLKEVDLSDIGGSKSTGKCRCKKNITNYKEFKLIQQSITGLYSCEKDLMTI

SEQ ID NO: 20 - protein, 1364 aa, Peptoniphilus sp.
  source 1..1364: note = Peptoniphilus duerdenii ATCC BAA1640
MKNLKEYYIGLDIGTASVGWAVTDESYNIPKFNGKKMWGVRLFDDAKTAEERRTQRGSRRRLNRRKERINLLQDLFATEISKVDPNFFLRLDNSDLYREDKDEKLKSKYTLFNDKDFKDRDYHKKYPTIHHLIMDLIEDEGKKDIRLLYLACHYLLKNRGHFIFEGQKFDTKNSFDKSINDLKIHLRDEYNIDLEFNNEDLIEIITDTTLNKTNKKKELKNIVGDTKFLKAISAIMIGSSQKLVDLFEDGEFEETTVKSVDFSTTAFDDKYSEYEEALGDTISLLNILKSIYDSSILENLLKDADKSKDGNKYISKAFVKKFNKHGKDLKTLKRIIKKYLPSEYANIFRNKSINDNYVAYTKSNITSNKRTKASKFTKQEDFYKFIKKHLDTIKETKLNSSENEDLKLIDEMLTDIEFKTFIPKLKSSDNGVIPYQLKLMELKKILDNQSKYYDFLNESDEYGTVKDKVESIMEFRIPYYVGPLNPDSKYAWIKRENTKITPWNFKDIVDLDSSREEFIDRLIGRCTYLKEEKVLPKASLIYNEFMVLNELNNLKLNEFLITEEMKKAIFEELFKTKKKVTLKAVSNLLKKEFNLTGDILLSGTDGDFKQGLNSYIDFKNIIGDKVDRDDYRIKIEEIIKLIVLYEDDKTYLKKKIKSAYKNDFTDDEIKKIAALNYKDWGRLSKRFLTGIEGVDKTTGEKGSIIYFMREYNLNLMELMSGHYTFTEEVEKLNPVENRELCYEMVDELYLSPSVKRMLWQSLRVVDEIKRIIGKDPKKIFIEMARAKEAKNSRKESRKNKLLEFYKFGKKAFINEIGEERYNYLLNEINSEEESKFRWDNLYLYYTQLGRCMYSLEPIDLADLKSNNIYDQDHIYPKSKIYDDSLENRVLVKKNLNHEKGNQYPIPEKVLNKNAYGFWKILFDKGLIGQKKYTRLTRRTPFEERELAEFIERQIVETRQATKETANLLKNICQDSEIVYSKAENASRFRQEFDIIKCRTVNDLHHMHDAYLNIVVGNVYNTKFTKNPLNFIKDKDNVRSYNLENMFKYDVVRGSYTAWIADDSEGNVKAATIKKVKRELEGKNYRFTRMSYIGTGGLYDQNLMRKGKGQIPQKENTNKSNIEKYGGYNKASSAYFALIESDGKAGRERTLETIPIMVYNQEKYGNTEAVDKYLKDNLELQDPKILKDKIKINSLIKLDGFLYNIKGKTGDSLSIAGSVQLIVNKEEQKLIKKMDKFLVKKKDNKDIKVTSFDNIKEEELIKLYKTLSDKLNNGIYSNKRNNQAKNISEALDKFKEISIEEKIDVLNQIILLFQSYNNGCNLKSIGLSAKTGVVFIPKKLNYKECKLINQSITGLFENEVDLLNL

SEQ ID NO: 21 - protein, 1358 aa, Acidaminococcus sp.
  source 1..1358: note = D21
MGKMYYLGLDIGTNSVGYAVTDPSYHLLKFKGEPMWGAHVFAAGNQSAERRSFRTSRRRLDRRQQRVKLVQEIFAPVISPIDPRFFIRLHESALWRDDVAETDKHIFFNDPTYTDKEYYSDYPTIHHLIVDLMESSEKHDPRLVYLAVAWLVAHRGHFLNEVDKDNIGDVLSFDAFYPEFLAFLSDNGVSPWVCESKALQATLLSRNSVNDKYKALKSLIFGSQKPEDNFDANISEDGLIQLLAGKKVKVNKLFPQESNDASFTLNDKEDAIEEILGTLTPDECEWIAHIRRLFDWAIMKHALKDGRTISESKVKLYEQHHHDLTQLKYFVKTYLAKEYDDIFRNVDSETTKNYVAYSYHVKEVKGTLPKNKATQEEFCKYVLGKVKNIECSEADKVDFDEMIQRLTDNSFMPKQVSGENRVIPYQLYYYELKTILNKAASYLPFLTQCGKDAISNQDKLLSIMTFRIPYFVGPLRKDNSEHAWLERKAGKIYPWNFNDKVDLDKSEEAFIRRMTNTCTYYPGEDVLPLDSLIYEKFMILNEINNIRIDGYPISVDVKQQVFGLFEKKRRVTVKDIQNLLLSLGALDKHGKLTGIDTTIHSNYNTYHHFKSLMERGVLTRDDVERIVERMTYSDDTKRVRLWLNNNYGTLTADDVKHISRLRKHDFGRLSKMFLTGLKGVHKETGERASILDFMWNTNDNLMQLLSECYTFSDEITKLQEAYYAKAQLSLNDFLDSMYISNAVKRPIYRTLAVVNDIRKACGTAPKRIFIEMARDGESKKKRSVTRREQIKNLYRSIRKDFQQEVDFLEKILENKSDGQLQSDALYLYFAQLGRDMYTGDPIKLEHIKDQSFYNIDHIYPQSMVKDDSLDNKVLVQSEINGEKSSRYPLDAAIRNKMKPLWDAYYNHGLISLKKYQRLTRSTPFTDDEKWDFINRQLVETRQSTKALAILLKRKFPDTEIVYSKAGLSSDFRHEFGLVKSRNINDLHHAKDAFLAIVTGNVYHERFNRRWFMVNQPYSVKTKTLFTHSIKNGNFVAWNGEEDLGRIVKMLKQNKNTIHFTRFSFDRKEGLFDIQPLKASTGLVPRKAGLDVVKYGGYDKSTAAYYLLVRFTLEDKKTQHKLMMIPVEGLYKARIDHDKEFLTDYAQTTISEILQKDKQKVINIMFPMGTRHIKLNSMISIDGFYLSIGGKSSKGKSVLCHAMVPLIVPHKIECYIKAMESFARKFKENNKLRIVEKFDKITVEDNLNLYELFLQKLQHNPYNKFFSTQFDVLTNGRSTFTKLSPEEQVQTLLNILSIFKTCRSSGCDLKSINGSAQAARIMISADLTGLSKKYSDIRLVEQSASGLFVSKSQNLLEYL

SEQ ID NO: 22 - protein, 1356 aa, Lactobacillus farciminis
  source 1..1356: note = KCTC 3681
MTKKEQPYNIGLDIGTSSVGWAVTNDNYDLLNIKKKNLWGVRLFEEAQTAKETRLNRSTRRRYRRRKNRINWLNEIFSEELAKTDPSFLIRLQNSWVSKKDPDRKRDKYNLFIDGPYTDKEYYREFPTIFHLRKELILNKDKADIRLIYLALHNILKYRGNFTYEHQKFNISNLNNNLSKELIELNQQLIKYDISFPDDCDWNHISDILIGRGNATQKSSNILKDFTLDKETKKLLKEVINLILGNVAHLNTIFKTSLTKDEEKLNFSGKDIESKLDDLDSILDDDQFTVLDAANRIYSTITLNEILNGESYFSMAKVNQYENHAIDLCKLRDMWHTTKNEEAVEQSRQAYDDYINKPKYGTKELYTSLKKFLKVALPTNLAKEAEEKISKGTYLVKPRNSENGVVPYQLNKIEMEKIIDNQSQYYPFLKENKEKLLSILSFRIPYYVGPLQSAEKNPFAWMERKSNGHARPWNFDEIVDREKSSNKFIRRMTVTDSYLVGEPVLPKNSLIYQRYEVLNELNNIRITENLKTNPIGSRLTVETKQRIYNELFKKYKKVTVKKLTKWLIAQGYYKNPILIGLSQKDEFNSTLTTYLDMKKIFGSSFMEDNKNYDQIEELIEWLTIFEDKQILNEKLHSSKYSYTPDQIKKISNMRYKGWGRLSKKILMDITTETNTPQLLQLSNYSILDLMWATNNNFISIMSNDKYDFKNYIENHNLNKNEDQNISDLVNDIHVSPALKRGITQSIKIVQEIVKFMGHAPKHIFIEVTRETKKSEITTSREKRIKRLQSKLLNKANDFKPQLREYLVPNKKIQEELKKHKNDLSSERIMLYFLQNGKSLYSEESLNINKLSDYQVDHILPRTYIPDDSLENKALVLAKENQRKADDLLLNSNVIDRNLERWTYMLNNNMIGLKKFKNLTRRVITDKDKLGFIHRQLVQTSQMVKGVANILDNMYKNQGTTCIQARANLSTAFRKALSGQDDTYHFKHPELVKNRNVNDFHHAQDAYLASFLGTYRLRRFPTNEMLLMNGEYNKFYGQVKELYSKKKKLPDSRKNGFIISPLVNGTTQYDRNTGEIIWNVGFRDKILKIFNYHQCNVTRKTEIKTGQFYDQTIYSPKNPKYKKLIAQKKDMDPNIYGGFSGDNKSSITIVKIDNNKIKPVAIPIRLINDLKDKKTLQNWLEENVKHKKSIQIIKNNVPIGQIIYSKKVGLLSLNSDREVANRQQLILPPEHSALLRLLQIPDEDLDQILAFYDKNILVEILQELITKMKKFYPFYKGEREFLIANIENFNQATTSEKVNSLEELITLLHANSTSAHLIFNNIEKKAFGRKTHGLTLNNTDFIYQSVTGLYETRIHIE

SEQ ID NO: 23 - protein, 1421 aa, Streptococcus sanguinis
  source 1..1421: note = SK49
MTKFNKNYSIGLDIGVSSVGYAVVTEDYRVPAFKFKVLGNTEKEKIKKNLIGSTTFVSAQPAKGTRVFRVNRRRIDRRNHRITYLRDIFQKEIEKVDKNFYRRLDESFRVLGDKSEDLQIKQPFFGDKELETAYHKKYPTIYHLRKHLADADKNSPVADIREVYMAISHILKYRGHFLTLDKINPNNINMQNSWIDFIESCQEVFDLEISDESKNIADIFKSSENRQEKVKKILPYFQQELLKKDKSIFKQLLQLLFGLKTKFKDCFELEEEPDLNFSKENYDENLENFLGSLEEDFSDVFAKLKVLRDTILLSGMLTYTGATHARFSATMVERYEEHRKDLQRFKFFIKQNLSEQDYLDIFGRKTQNGFDVDKETKGYVGYITNKMVLTNPQKQKTIQQNFYDYISGKITGIEGAEYFLNKISDGTFLRKLRTSDNGAIPNQIHAYELEKIIERQGKDYPFLLENKDKLLSILTFKIPYYVGPLAKGSNSRFAWIKRATSSDILDDNDEDTRNGKIRPWNYQKLINMDETRDAFITNLIGNDIILLNEKVLPKRSLIYEEVMLQNELTRVKYKDKYGKAHFFDSELRQNIINGLFKNNSKRVNAKSLIKYLSDNHKDLNAIEIVSGVEKGKSFNSTLKTYNDLKTIFSEELLDSEIYQKELEEIIKVITVFDDKKSIKNYLTKFFGHLEILDEEKINQLSKLRYSGWGRYSAKLLLDIRDEDTGFNLLQFLRNDEENRNLTKLISDNTLSFEPKIKDIQSKSTIEDDIFDEIKKLAGSPAIKRGILNSIKIVDELVQIIGYPPHNIVIEMARENMTTEEGQKKAKTRKTKLESALKNIENSLLENGKVPHSDEQLQSEKLYLYYLQNGKDMYTLDKTGSPAPLYLDQLDQYEVDHIIPYSFLPIDSIDNKVLTHRENNQQKLNNIPDKETVANMKPFWEKLYNAKLISQTKYQRLTTSERTPDGVLTESMKAGFIERQLVETRQIIKHVARILDNRFSDTKIITLKSQLITNFRNTFHIAKIRELNDYHHAHDAYLAVVVGQTLLKVYPKLAPELIYGHHAHFNRHEENKATLRKHLYSNIMRFFNNPDSKVSKDIWDCNRDLPIIKDVIYNSQINFVKRTMIKKGAFYNQNPVGKFNKQLAANNRYPLKTKALCLDTSIYGGYGPMNSALSIIIIAERFNEKKGKIETVKEFHDIFIIDYEKFNNNPFQFLNDTSENGFLKKNNINRVLGFYRIPKYSLMQKIDGTRMLFESKSNLHKATQFKLTKTQNELFFHMKRLLTKSNLMDLKSKSAIKESQNFILKHKEEFDNISNQLSAFSQKMLGNTTSLKNLIKGYNERKIKEIDIRDETIKYFYDNFIKMFSFVKSGAPKDINDFFDNKCTVARMRPKPDKKLLNATLIHQSITGLYETRIDLSKLGED

SEQ ID NO: 24 - protein, 1338 aa, Coprococcus catus
  source 1..1338: note = GD7
MKQEYFLGLDMGTGSLGWAVTDSTYQVMRKHGKALWGTRLFESASTAEERRMFRTARRRLDRRNWRIQVLQEIFSEEISKVDPGFFLRMKESKYYPEDKRDAEGNCPELPYALFVDDNYTDKNYHKDYPTIYHLRKMLMETTEIPDIRLVYLVLHHMMKHRGHFLLSGDISQIKEFKSTFEQLIQNIQDEELEWHISLDDAAIQFVEHVLKDRNLTRSTKKSRLIKQLNAKSACEKAILNLLSGGTVKLSDIFNNKELDESERPKVSFADSGYDDYIGIVEAELAEQYYIIASAKAVYDWSVLVEILGNSVSISEAKIKVYQKHQADLKTLKKIVRQYMTKEDYKRVFVDTEEKLNNYSAYIGMTKKNGKKVDLKSKQCTQADFYDFLKKNVIKVIDHKEITQEIESEIEKENFLPKQVTKDNGVIPYQVHDYELKKILDNLGTRMPFIKENAEKIQQLFEFRIPYYVGPLNRVDDGKDGKFTWSVRKSDARIYPWNFTEVIDVEASAEKFIRRMTNKCTYLVGEDVLPKDSLVYSKFMVLNELNNLRLNGEKISVELKQRIYEELFCKYRKVTRKKLERYLVIEGIAKKGVEITGIDGDFKASLTAYHDFKERLTDVQLSQRAKEAIVLNVVLFGDDKKLLKQRLSKMYPNLTTGQLKGICSLSYQGWGRLSKTFLEEITVPAPGTGEVWNIMTALWQTNDNLMQLLSRNYGFTNEVEEFNTLKKETDLSYKTVDELYVSPAVKRQIWQTLKVVKEIQKVMGNAPKRVFVEMAREKQEGKRSDSRKKQLVELYRACKNEERDWITELNAQSDQQLRSDKLFLYYIQKGRCMYSGETIQLDELWDNTKYDIDHIYPQSKTMDDSLNNRVLVKKNYNAIKSDTYPLSLDIQKKMMSFWKMLQQQGFITKEKYVRLVRSDELSADELAGFIERQIVETRQSTKAVATILKEALPDTEIVYVKAGNVSNFRQTYELLKVREMNDLHHAKDAYLNIVVGNAYFVKFTKNAAWFIRNNPGRSYNLKRMFEFDIERSGEIAWKAGNKGSIVTVKKVMQKNNILVTRKAYEVKGGLFDQQIMKKGKGQVPIKGNDERLADIEKYGGYNKAAGTYFMLVKSLDKKGKEIRTIEFVPLYLKNQIEINHESAIQYLAQERGLNSPEILLSKIKIDTLFKVDGFKMWLSGRTGNQLIFKGANQLILSHQEAAILKGVVKYVNRKNENKDAKLSERDGMTEEKLLQLYDTFLDKLSNTVYSIRLSAQIKTLTEKRAKFIGLSNEDQCIVLNEILHMFQCQSGSANLKLIGGPGSAGILVMNNNITACKQISVINQSPTGIYEKEIDLIKL

SEQ ID NO: 25 - protein, 1345 aa, Streptococcus mutans
  source 1..1345: note = UA159
MKKPYSIGLDIGTNSVGWAVVTDDYKVPAKKMKVLGNTDKSHIEKNLLGALLFDSGNTAEDRRLKRTARRRYTRRRNRILYLQEIFSEEMGKVDDSFFHRLEDSFLVTEDKRGERHPIFGNLEEEVKYHENFPTIYHLRQYLADNPEKVDLRLVYLALAHIIKFRGHFLIEGKFDTRNNDVQRLFQEFLAVYDNTFENSSLQEQNVQVEEILTDKISKSAKKDRVLKLFPNEKSNGRFAEFLKLIVGNQADFKKHFELEEKAPLQFSKDTYEEELEVLLAQIGDNYAELFLSAKKLYDSILLSGILTVTDVGTKAPLSASMIQRYNEHQMDLAQLKQFIRQKLSDKYNEVFSDVSKDGYAGYIDGKTNQEAFYKYLKGLLNKIEGSGYFLDKIEREDFLRKQRTFDNGSIPHQIHLQEMRAIIRRQAEFYPFLADNQDRIEKLLTFRIPYYVGPLARGKSDFAWLSRKSADKITPWNFDEIVDKESSAEAFINRMTNYDLYLPNQKVLPKHSLLYEKFTVYNELTKVKYKTEQGKTAFFDANMKQEIFDGVFKVYRKVTKDKLMDFLEKEFDEFRIVDLTGLDKENKVFNASYGTYHDLCKILDKDFLDNSKNEKILEDIVLTLTLFEDREMIRKRLENYSDLLTKEQVKKLERRHYTGWGRLSAELIHGIRNKESRKTILDYLIDDGNSNRNFMQLINDDALSFKEEIAKAQVIGETDNLNQVVSDIAGSPAIKKGILQSLKIVDELVKIMGHQPENIVVEMARENQFTNQGRRNSQQRLKGLTDSIKEFGSQILKEHPVENSQLQNDRLFLYYLQNGRDMYTGEELDIDYLSQYDIDHIIPQAFIKDNSIDNRVLTSSKENRGKSDDVPSKDVVRKMKSYWSKLLSAKLITQRKFDNLTKAERGGLTDDDKAGFIKRQLVETRQITKHVARILDERFNTETDENNKKIRQVKIVTLKSNLVSNFRKEFELYKVREINDYHHAHDAYLNAVIGKALLGVYPQLEPEFVYGDYPHFHGHKENKATAKKFFYSNIMNFFKKDDVRTDKNGEIIWKKDEHISNIKKVLSYPQVNIVKKVEEQTGGFSKESILPKGNSDKLIPRKTKKFYWDTKKYGGFDSPIVAYSILVIADIEKGKSKKLKTVKALVGVTIMEKMTFERDPVAFLERKGYRNVQEENIIKLPKYSLFKLENGRKRLLASARELQKGNEIVLPNHLGTLLYHAKNIHKVDEPKHLDYVDKHKDEFKELLDVVSNFSKKYTLAEGNLEKIKELYAQNNGEDLKELASSFINLLTFTAIGAPATFKFFDKNIDRKRYTSTTEILNATLIHQSITGLYETRIDLNKLGGD

SEQ ID NO: 26 - protein, 1368 aa, Streptococcus pyogenes [sequence omitted]

SEQ ID NO: 27 - protein, 1388 aa, Streptococcus thermophilus
  source 1..1388: note = LMD9
MTKPYSIGLDIGTNSVGWAVTTDNYKVPSKKMKVLGNTSKKYIKKNLLGVLLFDSGITAEGRRLKRTARRRYTRRRNRILYLQEIFSTEMATLDDAFFQRLDDSFLVPDDKRDSKYPIFGNLVEEKAYHDEFPTIYHLRKYLADSTKKADLRLVYLALAHMIKYRGHFLIEGEFNSKNNDIQKNFQDFLDTYNAIFESDLSLENSKQLEEIVKDKISKLEKKDRILKLFPGEKNSGIFSEFLKLIVGNQADFRKCFNLDEKASLHFSKESYDEDLETLLGYIGDDYSDVFLKAKKLYDAILLSGFLTVTDNETEAPLSSAMIKRYNEHKEDLALLKEYIRNISLKTYNEVFKDDTKNGYAGYIDGKTNQEDFYVYLKKLLAEFEGADYFLEKIDREDFLRKQRTFDNGSIPYQIHLQEMRAILDKQAKFYPFLAKNKERIEKILTFRIPYYVGPLARGNSDFAWSIRKRNEKITPWNFEDVIDKESSAEAFINRMTSFDLYLPEEKVLPKHSLLYETFNVYNELTKVRFIAESMRDYQFLDSKQKKDIVRLYFKDKRKVTDKDIIEYLHAIYGYDGIELKGIEKQFNSSLSTYHDLLNIINDKEFLDDSSNEAIIEEIIHTLTIFEDREMIKQRLSKFENIFDKSVLKKLSRRHYTGWGKLSAKLINGIRDEKSGNTILDYLIDDGISNRNFMQLIHDDALSFKKKIQKAQIIGDEDKGNIKEVVKSLPGSPAIKKGILQSIKIVDELVKVMGGRKPESIVVEMARENQYTNQGKSNSQQRLKRLEKSLKELGSKILKENIPAKLSKIDNNALQNDRLYLYYLQNGKDMYTGDDLDIDRLSNYDIDHIIPQAFLKDNSIDNKVLVSSASNRGKSDDVPSLEVVKKRKTFWYQLLKSKLISQRKFDNLTKAERGGLSPEDKAGFIQRQLVETRQITKHVARLLDEKFNNKKDENNRAVRTVKIITLKSTLVSQFRKDFELYKVREINDFHHAHDAYLNAVVASALLKKYPKLEPEFVYGDYPKYNSFRERKSATEKVYFYSNIMNIFKKSISLADGRVIERPLIEVNEETGESVWNKESDLATVRRVLSYPQVNVVKKVEEQNHGLDRGKPKGLFNANLSSKPKPNSNENLVGAKEYLDPKKYGGYAGISNSFTVLVKGTIEKGAKKKITNVLEFQGISILDRINYRKDKLNFLLEKGYKDIELIIELPKYSLFELSDGSRRMLASILSTNNKRGEIHKGNQIFLSQKFVKLLYHAKRISNTINENHRKYVENHKKEFEELFYYILEFNENYVGAKKNGKLLNSAFQSWQNHSIDELCSSFIGPTGSERKGLFELTSRGSAADFEFLGVKIPRYRDYTPSSLLKDATLIHQSVTGLYETRIDLAKLGEG

SEQ ID NO: 28 - protein, 1374 aa, Fusobacterium nucleatum
  source 1..1374: note = ATCC49256
MKKQKFSDYYLGFDIGTNSVGWCVTDLDYNVLRFNKKDMWGSRLFDEAKTAAERRVQRNSRRRLKRRKWRLNLLEEIFSDEIMKIDSNFFRRLKESSLWLEDKNSKEKFTLFNDDNYKDYDFYKQYPTIFHLRDELIKNPEKKDIRLIYLALHSIFKSRGHFLFEGQNLKEIKNFETLYNNLISFLEDNGINKSIDKDNIEKLEKIICDSGKGLKDKEKEFKGIFNSDKQLVAIFKLSVGSSVSLNDLFDTDEYKKEEVEKEKISFREQIYEDDKPIYYSILGEKIELLDIAKSFYDFMVLNNILSDSNYISEAKVKLYEEHKKDLKNLKYIIRKYNKENYDKLFKDKNENNYPAYIGLNKEKDKKEVVEKSRLKIDDLIKVIKGYLPKPERIEEKDKTIFNEILNKIELKTILPKQRISDNGTLPYQIHEVELEKILENQSKYYDFLNYEENGVSTKDKLLKTFKFRIPYYVGPLNSYHKDKGGNSWIVRKEEGKILPWNFEQKVDIEKSAEEFIKRMTNKCTYLNGEDVIPKDSFLYSEYIILNELNKVQVNDEFLNEENKRKIIDELFKENKKVSEKKFKEYLLVNQIANRTVELKGIKDSFNSNYVSYIKFKDIFGEKLNLDIYKEISEKSILWKCLYGDDKKIFEKKIKNEYGDILNKDEIKKINSFKFNTWGRLSEKLLTGIEFINLETGECYSSVMEALRRTNYNLMELLSSKFTLQESIDNENKEMNEVSYRDLIEESYVSPSLKRAILQTLKIYEEIKKITGRVPKKVFIEMARGGDESMKNKKIPARQEQLKKLYDSCGNDIANFSIDIKEMKNSLSSYDNNSLRQKKLYLYYLQFGKCMYTGREIDLDRLLQNNDTYDIDHIYPRSKVIKDDSFDNLVLVLKNENAEKSNEYPVKKEIQEKMKSFWRFLKEKNFISDEKYKRLTGKDDFELRGFMARQLVNVRQTTKEVGKILQQIEPEIKIVYSKAEIASSFREMFDFIKVRELNDTHHAKDAYLNIVAGNVYNTKFTEKPYRYLQEIKENYDVKKIYNYDIKNAWDKENSLEIVKKNMEKNTVNITRFIKEEKGELFNLNPIKKGETSNEIISIKPKLYDGKDNKLNEKYGYYTSLKAAYFIYVEHEKKNKKVKTFERITRIDSTLIKNEKNLIKYLVSQKKLLNPKIIKKIYKEQTLIIDSYPYTFTGVDSNKKVELKNKKQLYLEKKYEQILKNALKFVEDNQGETEENYKFIYLKKRNNNEKNETIDAVKERYNIEFNEMYDKFLEKLSSKDYKNYINNKLYTNFLNSKEKFKKLKLWEKSLILREFLKIFNKNTYGKYEIKDSQTKEKLFSFPEDTGRIRLGQSSLGNNKELLEESVTGLFVKKIKL

SEQ ID NO: 29 - protein, 1333 aa, Planococcus antarcticus
  source 1..1333: note = DSM 14505
MKNYTIGLDIGVASVGWVCIDENYKILNYNNRHAFGVHEFESAESAAGRRLKRGMRRRYNRRKKRLQLLQSLFDSYITDSGFFSKTDSQHFWKNNNEFENRSLTEVLSSLRISSRKYPTIYHLRSDLIESNKKMDLRLVYLALHNLVKYRGHFLQEGNWSEAASAEGMDDQLLELVTRYAELENLSPLDLSESQWKAAETLLLNRNLTKTDQSKELTAMFGKEYEPFCKLVAGLGVSLHQLFPSSEQALAYKETKTKVQLSNENVEEVMELLLEEESALLEAVQPFYQQVVLYELLKGETYVAKAKVSAFKQYQKDMASLKNLLDKTFGEKVYRSYFISDKNSQREYQKSHKVEVLCKLDQFNKEAKFAETFYKDLKKLLEDKSKTSIGTTEKDEMLRIIKAIDSNQFLQKQKGIQNAAIPHQNSLYEAEKILRNQQAHYPFITTEWIEKVKQILAFRIPYYIGPLVKDTTQSPFSWVERKGDAPITPWNFDEQIDKAASAEAFISRMRKTCTYLKGQEVLPKSSLTYERFEVLNELNGIQLRTTGAESDFRHRLSYEMKCWIIDNVFKQYKTVSTKRLLQELKKSPYADELYDEHTGEIKEVFGTQKENAFATSLSGYISMKSILGAVVDDNPAMTEELIYWIAVFEDREILHLKIQEKYPSITDVQRQKLALVKLPGWGRFSRLLIDGLPLDEQGQSVLDHMEQYSSVFMEVLKNKGFGLEKKIQKMNQHQVDGTKKIRYEDIEELAGSPALKRGIWRSVKIVEELVSIFGEPANIVLEVAREDGEKKRTKSRKDQWEELTKTTLKNDPDLKSFIGEIKSQGDQRFNEQRFWLYVTQQGKCLYTGKALDIQNLSMYEVDHILPQNFVKDDSLDNLALVMPEANQRKNQVGQNKMPLEIIEANQQYAMRTLWERLHELKLISSGKLGRLKKPSFDEVDKDKFIARQLVETRQIIKHVRDLLDERFSKSDIHLVKAGIVSKFRRFSEIPKIRDYNNKHHAMDALFAAALIQSILGKYGKNFLAFDLSKKDRQKQWRSVKGSNKEFFLFKNFGNLRLQSPVTGEEVSGVEYMKHVYFELPWQTTKMTQTGDGMFYKESIFSPKVKQAKYVSPKTEKFVHDEVKNHSICLVEFTFMKKEKEVQETKFIDLKVIEHHQFLKEPESQLAKFLAEKETNSPIIHARIIRTIPKYQKIWIEHFPYYFISTRELHNARQFEISYELMEKVKQLSERSSVEELKIVFGLLIDQMNDNYPIYTKSSIQDRVQKFVDTQLYDFKSFEIGFEELKKAVAANAQRSDTFGSRISKKPKPEEVAIGYESITGLKYRKPRSVVGTKR

SEQ ID NO: 30 - protein, 1395 aa, Treponema denticola
  source 1..1395: note = ATCC 35405
MKKEIKDYFLGLDVGTGSVGWAVTDTDYKLLKANRKDLWGMRCFETAETAEVRRLHRGARRRIERRKKRIKLLQELFSQEIAKTDEGFFQRMKESPFYAEDKTILQENTLFNDKDFADKTYHKAYPTINHLIKAWIENKVKPDPRLLYLACHNIIKKRGHFLFEGDFDSENQFDTSIQALFEYLREDMEVDIDADSQKVKEILKDSSLKNSEKQSRLNKILGLKPSDKQKKAITNLISGNKINFADLYDNPDLKDAEKNSISFSKDDFDALSDDLASILGDSFELLLKAKAVYNCSVLSKVIGDEQYLSFAKVKIYEKHKTDLTKLKNVIKKHFPKDYKKVFGYNKNEKNNNNYSGYVGVCKTKSKKLIINNSVNQEDFYKFLKTILSAKSEIKEVNDILTEIETGTFLPKQISKSNAEIPYQLRKMELEKILSNAEKHFSFLKQKDEKGLSHSEKIIMLLTFKIPYYIGPINDNHKKFFPDRCWVVKKEKSPSGKTTPWNFFDHIDKEKTAEAFITSRTNFCTYLVGESVLPKSSLLYSEYTVLNEINNLQIIIDGKNICDIKLKQKIYEDLFKKYKKITQKQISTFIKHEGICNKTDEVIILGIDKECTSSLKSYIELKNIFGKQVDEISTKNMLEEIIRWATIYDEGEGKTILKTKIKAEYGKYCSDEQIKKILNLKFSGWGRLSRKFLETVTSEMPGFSEPVNIITAMRETQNNLMELLSSEFTFTENIKKINSGFEDAEKQFSYDGLVKPLFLSPSVKKMLWQTLKLVKEISHITQAPPKKIFIEMAKGAELEPARTKTRLKILQDLYNNCKNDADAFSSEIKDLSGKIENEDNLRLRSDKLYLYYTQLGKCMYCGKPIEIGHVFDTSNYDIDHIYPQSKIKDDSISNRVLVCSSCNKNKEDKYPLKSEIQSKQRGFWNFLQRNNFISLEKLNRLTRATPISDDETAKFIARQLVETRQATKVAAKVLEKMFPETKIVYSKAETVSMFRNKFDIVKCREINDFHHAHDAYLNIVVGNVYNTKFTNNPWNFIKEKRDNPKIADTYNYYKVFDYDVKRNNITAWEKGKTIITVKDMLKRNTPIYTRQAACKKGELFNQTIMKKGLGQHPLKKEGPFSNISKYGGYNKVSAAYYTLIEYEEKGNKIRSLETIPLYLVKDIQKDQDVLKSYLTDLLGKKEFKILVPKIKINSLLKINGFPCHITGKTNDSFLLRPAVQFCCSNNEVLYFKKIIRFSEIRSQREKIGKTISPYEDLSFRSYIKENLWKKTKNDEIGEKEFYDLLQKKNLEIYDMLLTKHKDTIYKKRPNSATIDILVKGKEKFKSLIIENQFEVILEILKLFSATRNVSDLQHIGGSKYSGVAKIGNKISSLDNCILIYQSITGIFEKRIDLLKV

SEQ ID NO: 31 - protein, 1327 aa, Solobacterium moorei
  source 1..1327: note = F0204
MEGQMKNNGNNLQQGNYYLGLDVGTSSVGWAVTDTDYNVLKFRGKSMWGARLFDEASTAEERRTHRGNRRRLARRKYRLLLLEQLFEKEIRKIDDNFFVRLHESNLWADDKSKPSKFLLFNDTNFTDKDYLKKYPTIYHLRSDLIHNSTEHDIRLVFLALHHLIKYRGHFIYDNSANGDVKTLDEAVSDFEEYLNENDIEFNIENKKEFINVLSDKHLTKKEKKISLKKLYGDITDSENINISVLIEMLSGSSISLSNLFKDIEFDGKQNLSLDSDIEETLNDVVDILGDNIDLLIHAKEVYDIAVLTSSLGKHKYLCDAKVELFEKNKKDLMILKKYIKKNHPEDYKKIFSSPTEKKNYAAYSQTNSKNVCSQEEFCLFIKPYIRDMVKSENEDEVRIAKEVEDKSFLTKLKGTNNSVVPYQIHERELNQILKNIVAYLPFMNDEQEDISVVDKIKLIFKFKIPYYVGPLNTKSTRSWVYRSDEKIYPWNFSNVIDLDKTAHEFMNRLIGRCTYTNDPVLPMDSLLYSKYNVLNEINPIKVNGKAIPVEVKQAIYTDLFENSKKKVTRKSIYIYLLKNGYIEKEDIVSGIDIEIKSKLKSHHDFTQIVQENKCTPEEIERIIKGILVYSDDKSMLRRWLKNNIKGLSENDVKYLAKLNYKEWGRLSKTLLTDIYTINPEDGEACSILDIMWNTNATLMEILSNEKYQFKQNIENYKAENYDEKQNLHEELDDMYISPAARRSIWQALRIVDEIVDIKKSAPKKIFIEMAREKKSAMKKKRTESRKDTLLELYKSCKSQADGFYDEELFEKLSNESNSRLRRDQLYLYYTQMGRSMYTGKRIDFDKLINDKNTYDIDHIYPRSKIKDDSITNRVLVEKDINGEKTDIYPISEDIRQKMQPFWKILKEKGLINEEKYKRLTRNYELTDEELSSFVARQLVETQQSTKALATLLKKEYPSAKIVYSKAGNVSEFRNRKDKELPKFREINDLHHAKDAYLNIVVGNVYDTKFTEKFFNNIRNENYSLKRVFDFSVPGAWDAKGSTFNTIKKYMAKNNPIIAFAPYEVKGELFDQQIVPKGKGQFPIKQGKDIEKYGGYNKLSSAFLFAVEYKGKKARERSLETVYIKDVELYLQDPIKYCESVLGLKEPQIIKPKILMGSLFSINNKKLVVTGRSGKQYVCHHIYQLSINDEDSQYLKNIAKYLQEEPDGNIERQNILNITSVNNIKLFDVLCTKFNSNTYEIILNSLKNDVNEGREKFSELDILEQCNILLQLLKAFKCNRESSNLEKLNNKKQAGVIVIPHLFTKCSVFKVIHQSITGLFEKEMDLLK

SEQ ID NO: 32 - protein, 1334 aa, Staphylococcus pseudintermedius
  source 1..1334: note = ED99
MGRKPYILSLDIGTGSVGYACMDKGFNVLKYHDKDALGVYLFDGALTAQERRQFRTSRRRKNRRIKRLGLLQELLAPLVQNPNFYQFQRQFAWKNDNMDFKNKSLSEVLSFLGYESKKYPTIYHLQEALLLKDEKFDPELIYMALYHLVKYRGHFLFDHLKIENLTNNDNMHDFVELIETYENLNNIKLNLDYEKTKVIYEILKDNEMTKNDRAKRVKNMEKKLEQFSIMLLGLKFNEGKLFNHADNAEELKGANQSHTFADNYEENLTPFLTVEQSEFIERANKIYLSLTLQDILKGKKSMAMSKVAAYDKFRNELKQVKDIVYKADSTRTQFKKIFVSSKKSLKQYDATPNDQTFSSLCLFDQYLIRPKKQYSLLIKELKKIIPQDSELYFEAENDTLLKVLNTTDNASIPMQINLYEAETILRNQQKYHAEITDEMIEKVLSLIQFRIPYYVGPLVNDHTASKFGWMERKSNESIKPWNFDEVVDRSKSATQFIRRMTNKCSYLINEDVLPKNSLLYQEMEVLNELNATQIRLQTDPKNRKYRMMPQIKLFAVEHIFKKYKTVSHSKFLEIMLNSNHRENFMNHGEKLSIFGTQDDKKFASKLSSYQDMTKIFGDIEGKRAQIEEIIQWITIFEDKKILVQKLKECYPELTSKQINQLKKLNYSGWGRLSEKLLTHAYQGHSIIELLRHSDENFMEILTNDVYGFQNFIKEENQVQSNKIQHQDIANLTTSPALKKGIWSTIKLVRELTSIFGEPEKIIMEFATEDQQKGKKQKSRKQLWDDNIKKNKLKSVDEYKYIIDVANKLNNEQLQQEKLWLYLSQNGKCMYSGQSIDLDALLSPNATKHYEVDHIFPRSFIKDDSIDNKVLVIKKMNQTKGDQVPLQFIQQPYERIAYWKSLNKAGLISDSKLHKLMKPEFTAMDKEGFIQRQLVETRQISVHVRDFLKEEYPNTKVIPMKAKMVSEFRKKFDIPKIRQMNDAHHAIDAYLNGVVYHGAQLAYPNVDLFDFNFKWEKVREKWKALGEFNTKQKSRELFFFKKLEKMEVSQGERLISKIKLDMNHFKINYSRKLANIPQQFYNQTAVSPKTAELKYESNKSNEVVYKGLTPYQTYVVAIKSVNKKGKEKMEYQMIDHYVFDFYKFQNGNEKELALYLAQRENKDEVLDAQIVYSLNKGDLLYINNHPCYFVSRKEVINAKQFELTVEQQLSLYNVMNNKETNVEKLLIEYDFIAEKVINEYHHYLNSKLKEKRVRTFFSESNQTHEDFIKALDELFKVVTASATRSDKIGSRKNSMTHRAFLGKGKDVKIAYTSISGLKTTKPKSLFKLAESRNEL

SEQ ID NO: 33 - protein, 1472 aa, Flavobacterium branchiophilum
  source 1..1472: note = FL15
MAKILGLDLGTNSIGWAVVERENIDFSLIDKGVRIFSEGVKSEKGIESSRAAERTGYRSARKIKYRRKLRKYETLKVLSLNRMCPLSIEEVEEWKKSGFKDYPLNPEFLKWLSTDEESNVNPYFFRDRASKHKVSLFELGRAFYHIAQRRGFLSNRLDQSAEGILEEHCPKIEAIVEDLISIDEISTNITDYFFETGILDSNEKNGYAKDLDEGDKKLVSLYKSLLAILKKNESDFENCKSEIIERLNKKDVLGKVKGKIKDISQAMLDGNYKTLGQYFYSLYSKEKIRNQYTSREEHYLSEFITICKVQGIDQINEEEKINEKKFDGLAKDLYKAIFFQRPLKSQKGLIGKCSFEKSKSRCAISHPDFEEYRMWTYLNTIKIGTQSDKKLRFLTQDEKLKLVPKFYRKNDFNFDVLAKELIEKGSSFGFYKSSKKNDFFYWFNYKPTDTVAACQVAASLKNAIGEDWKTKSFKYQTINSNKEQVSRTVDYKDLWHLLTVATSDVYLYEFAIDKLGLDEKNAKAFSKTKLKKDFASLSLSAINKILPYLKEGLLYSHAVFVANIENIVDENIWKDEKQRDYIKTQISEIIENYTLEKSRFEIINGLLKEYKSENEDGKRVYYSKEAEQSFENDLKKKLVLFYKSNEIENKEQQETIFNELLPIFIQQLKDYEFIKIQRLDQKVLIFLKGKNETGQIFCTEEKGTAEEKEKKIKNRLKKLYHPSDIEKFKKKIIKDEFGNEKIVLGSPLTPSIKNPMAMRALHQLRKVLNALILEGQIDEKTIIHIEMARELNDANKRKGIQDYQNDNKKFREDAIKEIKKLYFEDCKKEVEPTEDDILRYQLWMEQNRSEIYEEGKNISICDIIGSNPAYDIEHTIPRSRSQDNSQMNKTLCSQRFNREVKKQSMPIELNNHLEILPRIAHWKEEADNLTREIEIISRSIKAAATKEIKDKKIRRRHYLTLKRDYLQGKYDRFIWEEPKVGFKNSQIPDTGIITKYAQAYLKSYFKKVESVKGGMVAEFRKIWGIQESFIDENGMKHYKVKDRSKHTHHTIDAITIACMTKEKYDVLAHAWTLEDQQNKKEARSIIEASKPWKTFKEDLLKIEEEILVSHYTPDNVKKQAKKIVRVRGKKQFVAEVERDVNGKAVPKKAASGKTIYKLDGEGKKLPRLQQGDTIRGSLHQDSIYGAIKNPLNTDEIKYVIRKDLESIKGSDVESIVDEVVKEKIKEAIANKVLLLSSNAQQKNKLVGTVWMNEEKRIAINKVRIYANSVKNPLHIKEHSLLSKSKHVHKQKVYGQNDENYAMAIYELDGKRDFELINIFNLAKLIKQGQGFYPLHKKKEIKGKIVFVPIEKRNKRDVVLKRGQQVVFYDKEVENPKDISEIVDFKGRIYIIEGLSIQRIVRPSGKVDEYGVIMLRYFKEARKADDIKQDNFKPDGVFKLGENKPTRKMNHQFTAFVEGIDFKVLPSGKFEKI

SEQ ID NO: 34 - protein, 1688 aa, Ignavibacterium album
  source 1..1688: note = JCM 16511
MEFKKVLGLDIGTNSIGCALLSLPKSIQDYGKGGRLEWLTSRVIPLDADYMKAFIDGKNGLPQVITPAGKRRQKRGSRRLKHRYKLRRSRLIRVFKTLNWLPEDFPLDNPKRIKETISTEGKFSFRISDYVPISDESYREFYREFGYPENEIEQVIEEINFRRKTKGKNKNPMIKLLPEDWVVYYLRKKALIKPTTKEELIRIIYLFNQRRGFKSSRKDLTETAILDYDEFAKRLAEKEKYSAENYETKFVSITKVKEVVELKTDGRKGKKRFKVILEDSRIEPYEIERKEKPDWEGKEYTFLVTQKLEKGKFKQNKPDLPKEEDWALCTTALDNRMGSKHPGEFFFDELLKAFKEKRGYKIRQYPVNRWRYKKELEFIWTKQCQLNPELNNLNINKEILRKLATVLYPSQSKFFGPKIKEFENSDVLHIISEDIIYYQRDLKSQKSLISECRYEKRKGIDGEIYGLKCIPKSSPLYQEFRIWQDIHNIKVIRKESEVNGKKKINIDETQLYINENIKEKLFELFNSKDSLSEKDILELISLNIINSGIKISKKEEETTHRINLFANRKELKGNETKSRYRKVFKKLGFDGEYILNHPSKLNRLWHSDYSNDYADKEKTEKSILSSLGWKNRNGKWEKSKNYDVFNLPLEVAKAIANLPPLKKEYGSYSALAIRKMLVVMRDGKYWQHPDQIAKDQENTSLMLFDKNLIQLTNNQRKVLNKYLLTLAEVQKRSTLIKQKLNEIEHNPYKLELVSDQDLEKQVLKSFLEKKNESDYLKGLKTYQAGYLIYGKHSEKDVPIVNSPDELGEYIRKKLPNNSLRNPIVEQVIRETIFIVRDVWKSFGIIDEIHIELGRELKNNSEERKKTSESQEKNFQEKERARKLLKELLNSSNFEHYDENGNKIFSSFTVNPNPDSPLDIEKFRIWKNQSGLTDEELNKKLKDEKIPTEIEVKKYILWLTQKCRSPYTGKIIPLSKLFDSNVYEIEHIIPRSKMKNDSTNNLVICELGVNKAKGDRLAANFISESNGKCKFGEVEYTLLKYGDYLQYCKDTFKYQKAKYKNLLATEPPEDFIERQINDTRYIGRKLAELLTPVVKDSKNIIFTIGSITSELKITWGLNGVWKDILRPRFKRLESIINKKLIFQDEDDPNKYHFDLSINPQLDKEGLKRLDHRHHALDATIIAATTREHVRYLNSLNAADNDEEKREYFLSLCNHKIRDFKLPWENFTSEVKSKLLSCVVSYKESKPILSDPFNKYLKWEYKNGKWQKVFAIQIKNDRWKAVRRSMFKEPIGTVWIKKIKEVSLKEAIKIQAIWEEVKNDPVRKKKEKYIYDDYAQKVIAKIVQELGLSSSMRKQDDEKLNKFINEAKVSAGVNKNLNTTNKTIYNLEGRFYEKIKVAEYVLYKAKRMPLNKKEYIEKLSLQKMFNDLPNFILEKSILDNYPEILKELESDNKYIIEPHKKNNPVNRLLLEHILEYHNNPKEAFSTEGLEKLNKKAINKIGKPIKYITRLDGDINEEEIFRGAVFETDKGSNVYFVMYENNQTKDREFLKPNPSISVLKAIEHKNKIDFFAPNRLGFSRIILSPGDLVYVPTNDQYVLIKDNSSNETIINWDDNEFISNRIYQVKKFTGNSCYFLKNDIASLILSYSASNGVGEFGSQNISEYSVDDPPIRIKDVCIKIRVDRLGNVRPL

SEQ ID NO: 35 - protein, 1415 aa, Bergeyella zoohelcum
  source 1..1415: note = ATCC 43767
MKHILGLDLGTNSIGWALIERNIEEKYGKIIGMGSRIVPMGAELSKFEQGQAQTKNADRRTNRGARRLNKRYKQRRNKLIYILQKLDMLPSQIKLKEDFSDPNKIDKITILPISKKQEQLTAFDLVSLRVKALTEKVGLEDLGKIIYKYNQLRGYAGGSLEPEKEDIFDEEQSKDKKNKSFIAFSKIVFLGEPQEEIFKNKKLNRRAIIVETEEGNFEGSTFLENIKVGDSLELLINISASKSGDTITIKLPNKTNWRKKMENIENQLKEKSKEMGREFYISEFLLELLKENRWAKIRNNTILRARYESEFEAIWNEQVKHYPFLENLDKKTLIEIVSFIFPGEKESQKKYRELGLEKGLKYIIKNQVVFYQRELKDQSHLISDCRYEPNEKAIAKSHPVFQEYKVWEQINKLIVNTKIEAGTNRKGEKKYKYIDRPIPTALKEWIFEELQNKKEITFSAIFKKLKAEFDLREGIDFLNGMSPKDKLKGNETKLQLQKSLGELWDVLGLDSINRQIELWNILYNEKGNEYDLTSDRTSKVLEFINKYGNNIVDDNAEETAIRISKIKFARAYSSLSLKAVERILPLVRAGKYFNNDFSQQLQSKILKLLNENVEDPFAKAAQTYLDNNQSVLSEGGVGNSIATILVYDKHTAKEYSHDELYKSYKEINLLKQGDLRNPLVEQIINEALVLIRDIWKNYGIKPNEIRVELARDLKNSAKERATIHKRNKDNQTINNKIKETLVKNKKELSLANIEKVKLWEAQRHLSPYTGQPIPLSDLFDKEKYDVDHIIPISRYFDDSFTNKVISEKSVNQEKANRTAMEYFEVGSLKYSIFTKEQFIAHVNEYFSGVKRKNLLATSIPEDPVQRQIKDTQYIAIRVKEELNKIVGNENVKTTTGSITDYLRNHWGLTDKFKLLLKERYEALLESEKFLEAEYDNYKKDFDSRKKEYEEKEVLFEEQELTREEFIKEYKENYIRYKKNKLIIKGWSKRIDHRHHAIDALIVACTEPAHIKRLNDLNKVLQDWLVEHKSEFMPNFEGSNSELLEEILSLPENERTEIFTQIEKFRAIEMPWKGFPEQVEQKLKEIIISHKPKDKLLLQYNKAGDRQIKLRGQLHEGTLYGISQGKEAYRIPLTKFGGSKFATEKNIQKIVSPFLSGFIANHLKEYNNKKEEAFSAEGIMDLNNKLAQYRNEKGELKPHTPISTVKIYYKDPSKNKKKKDEEDLSLQKLDREKAFNEKLYVKTGDNYLFAVLEGEIKTKKTSQIKRLYDIISFFDATNFLKEEFRNAPDKKTFDKDLLFRQYFEERNKAKLLFTLKQGDFVYLPNENEEVILDKESPLYNQYWGDLKERGKNIYVVQKFSKKQIYFIKHTIADIIKKDVEFGSQNCYETVEGRSIKENCFKLEIDRLGNIVKVIKR

SEQ ID NO: 36 - protein, 1166 aa, Nitrobacter hamburgensis
  source 1..1166: note = X14
MHVEIDFPHFSRGDSHLAMNKNEILRGSSVLYRLGLDLGSNSLGWFVTHLEKRGDRHEPVALGPGGVRIFPDGRDPQSGTSNAVDRRMARGARKRRDRFVERRKELIAALIKYNLLPDDARERRALEVLDPYALRKTALTDTLPAHHVGRALFHLNQRRGFQSNRKTDSKQSEDGAIKQAASRLATDKGNETLGVFFADMHLRKSYEDRQTAIRAELVRLGKDHLTGNARKKIWAKVRKRLFGDEVLPRADAPHGVRARATITGTKASYDYYPTRDMLRDEFNAIWAGQSAHHATITDEARTEIEHIIFYQRPLKPAIVGKCTLDPATRPFKEDPEGYRAPWSHPLAQRFRILSEARNLEIRDTGKGSRRLTKEQSDLVVAALLANREVKFDKLRTLLKLPAEARFNLESDRRAALDGDQTAARLSDKKGFNKAWRGFPPERQIAIVARLEETEDENELIAWLEKECALDGAAAARVANTTLPDGHCRLGLRAIKKIVPIMQDGLDEDGVAGAGYHIAAKRAGYDHAKLPTGEQLGRLPYYGQWLQDAVVGSGDARDQKEKQYGQFPNPTVHIGLGQLRRVVNDLIDKYGPPTEISIEFTRALKLSEQQKAERQREQRRNQDKNKARAEELAKFGRPANPRNLLKMRLWEELAHDPLDRKCVYTGEQISIERLLSDEVDIDHILPVAMTLDDSPANKIICMRYANRHKRKQTPSEAFGSSPTLQGHRYNWDDIAARATGLPRNKRWRFDANAREEFDKRGGFLARQLNETGWLARLAKQYLGAVTDPNQIWVVPGRLTSMLRGKWGLNGLLPSDNYAGVQDKAEEFLASTDDMEFSGVKNRADHRHHAIDGLVTALTDRSLLWKMANAYDEEHEKFVIEPPWPTMRDDLKAALEKMVVSHKPDHGIEGKLHEDSAYGFVKPLDATGLKEEEAGNLVYRKAIESLNENEVDRIRDIQLRTIVRDHVNVEKTKGVALADALRQLQAPSDDYPQFKHGLRHVRILKKEKGDYLVPIANRASGVAYKAYSAGENFCVEVFETAGGKWDGEAVRRFDANKKNAGPKIAHAPQWRDANEGAKLVMRIHKGDLIRLDHEGRARIMVVHRLDAAAGRFKLADHNETGNLDKRHATNNDIDPFRWLMASYNTLKKLAAVPVRVDELGRVWRVMPN

SEQ ID NO: 37 - protein, 1498 aa, Odoribacter laneus
  source 1..1498: note = YIT 12061
METTLGIDLGTNSIGLALVDQEEHQILYSGVRIFPEGINKDTIGLGEKEESRNATRRAKRQMRRQYFRKKLRKAKLLELLIAYDMCPLKPEDVRRWKNWDKQQKSTVRQFPDTPAFREWLKQNPYELRKQAVTEDVTRPELGRILYQMIQRRGFLSSRKGKEEGKIFTGKDRMVGIDETRKNLQKQTLGAYLYDIAPKNGEKYRFRTERVRARYTLRDMYIREFEIIWQRQAGHLGLAHEQATRKKNIFLEGSATNVRNSKLITHLQAKYGRGHVLIEDTRITVTFQLPLKEVLGGKIEIEEEQLKFKSNESVLFWQRPLRSQKSLLSKCVFEGRNFYDPVHQKWIIAGPTPAPLSHPEFEEFRAYQFINNIIYGKNEHLTAIQREAVFELMCTESKDFNFEKIPKHLKLFEKFNFDDTTKVPACTTISQLRKLFPHPVWEEKREEIWHCFYFYDDNTLLFEKLQKDYALQTNDLEKIKKIRLSESYGNVSLKAIRRINPYLKKGYAYSTAVLLGGIRNSFGKRFEYFKEYEPEIEKAVCRILKEKNAEGEVIRKIKDYLVHNRFGFAKNDRAFQKLYHHSQAITTQAQKERLPETGNLRNPIVQQGLNELRRTVNKLLATCREKYGPSFKFDHIHVEMGRELRSSKTEREKQSRQIRENEKKNEAAKVKLAEYGLKAYRDNIQKYLLYKEIEEKGGTVCCPYTGKTLNISHTLGSDNSVQIEHIIPYSISLDDSLANKTLCDATFNREKGELTPYDFYQKDPSPEKWGASSWEEIEDRAFRLLPYAKAQRFIRRKPQESNEFISRQLNDTRYISKKAVEYLSAICSDVKAFPGQLTAELRHLWGLNNILQSAPDITFPLPVSATENHREYYVITNEQNEVIRLFPKQGETPRTEKGELLLTGEVERKVFRCKGMQEFQTDVSDGKYWRRIKLSSSVTWSPLFAPKPISADGQIVLKGRIEKGVFVCNQLKQKLKTGLPDGSYWISLPVISQTFKEGESVNNSKLTSQQVQLFGRVREGIFRCHNYQCPASGADGNFWCTLDTDTAQPAFTPIKNAPPGVGGGQIILTGDVDDKGIFHADDDLHYELPASLPKGKYYGIFTVESCDPTLIPIELSAPKTSKGENLIEGNIWVDEHTGEVRFDPKKNREDQRHHAIDAIVIALSSQSLFQRLSTYNARRENKKRGLDSTEHFPSPWPGFAQDVRQSVVPLLVSYKQNPKTLCKISKTLYKDGKKIHSCGNAVRGQLHKETVYGQRTAPGATEKSYHIRKDIRELKTSKHIGKVVDITIRQMLLKHLQENYHIDITQEFNIPSNAFFKEGVYRIFLPNKHGEPVPIKKIRMKEELGNAERLKDNINQYVNPRNNHHVMIYQDADGNLKEEIVSFWSVIERQNQGQPIYQLPREGRNIVSILQINDTFLIGLKEEEPEVYRNDLSTLSKHLYRVQKLSGMYYTFRHHLASTLNNEREEFRIQSLEAWKRANPVKVQIDEIGRITFLNGPLC

SEQ ID NO: 38 - protein, 1372 aa, Legionella pneumophila
  source 1..1372: note = str. Paris
MESSQILSPIGIDLGGKFTGVCLSHLEAFAELPNHANTKYSVILIDHNNFQLSQAQRRATRHRVRNKKRNQFVKRVALQLFQHILSRDLNAKEETALCHYLNNRGYTYVDTDLDEYIKDETTINLLKELLPSESEHNFIDWFLQKMQSSEFRKILVSKVEEKKDDKELKNAVKNIKNFITGFEKNSVEGHRHRKVYFENIKSDITKDNQLDSIKKKIPSVCLSNLLGHLSNLQWKNLHRYLAKNPKQFDEQTFGNEFLRMLKNFRHLKGSQESLAVRNLIQQLEQSQDYISILEKTPPEITIPPYEARTNTGMEKDQSLLLNPEKLNNLYPNWRNLIPGIIDAHPFLEKDLEHTKLRDRKRIISPSKQDEKRDSYILQRYLDLNKKIDKFKIKKQLSFLGQGKQLPANLIETQKEMETHFNSSLVSVLIQIASAYNKEREDAAQGIWFDNAFSLCELSNINPPRKQKILPLLVGAILSEDFINNKDKWAKFKIFWNTHKIGRTSLKSKCKEIEEARKNSGNAFKIDYEEALNHPEHSNNKALIKIIQTIPDIIQAIQSHLGHNDSQALIYHNPFSLSQLYTILETKRDGFHKNCVAVTCENYWRSQKTEIDPEISYASRLPADSVRPFDGVLARMMQRLAYEIAMAKWEQIKHIPDNSSLLIPIYLEQNRFEFEESFKKIKGSSSDKTLEQAIEKQNIQWEEKFQRIINASMNICPYKGASIGGQGEIDHIYPRSLSKKHFGVIFNSEVNLIYCSSQGNREKKEEHYLLEHLSPLYLKHQFGTDNVSDIKNFISQNVANIKKYISFHLLTPEQQKAARHALFLDYDDEAFKTITKFLMSQQKARVNGTQKFLGKQIMEFLSTLADSKQLQLEFSIKQITAEEVHDHRELLSKQEPKLVKSRQQSFPSHAIDATLTMSIGLKEFPQFSQELDNSWFINHLMPDEVHLNPVRSKEKYNKPNISSTPLFKDSLYAERFIPVWVKGETFAIGFSEKDLFEIKPSNKEKLFTLLKTYSTKNPGESLQELQAKSKAKWLYFPINKTLALEFLHHYFHKEIVTPDDTTVCHFINSLRYYTKKESITVKILKEPMPVLSVKFESSKKNVLGSFKHTIALPATKDWERLFNHPNFLALKANPAPNPKEFNEFIRKYFLSDNNPNSDIPNNGHNIKPQKHKAVRKVFSLPVIPGNAGTMMRIRRKDNKGQPLYQLQTIDDTPSMGIQINEDRLVKQEVLMDAYKTRNLSTIDGINNSEGQAYATFDNWLTLPVSTFKPEIIKLEMKPHSKTRRYIRITQSLADFIKTIDEALMIKPSDSIDDPLNMPNEIVCKNKLFGNELKPRDGKMKIVSTGKIVTYEFESDSTPQWIQTLYVTQLKKQP

SEQ ID NO: 39 - protein, 1517 aa, Bacteroides sp.
  source 1..1517: note = 20 3
MKKIVGLDLGTNSIGWALINAYINKEHLYGIEACGSRIIPMDAAILGNFDKGNSISQTADRTSYRGIRRLRERHLLRRERLHRILDLLGFLPKHYSDSLNRYGKFLNDIECKLPWVKDETGSYKFIFQESFKEMLANFTEHHPILIANNKKVPYDWTIYYLRKKALTQKISKEELAWILLNFNQKRGYYQLRGEEEETPNKLVEYYSLKVEKVEDSGERKGKDTWYNVHLENGMIYRRTSNIPLDWEGKTKEFIVTTDLEADGSPKKDKEGNIKRSFRAPKDDDWTLIKKKTEADIDKIKMTVGAYIYDTLLQKPDQKIRGKLVRTIERKYYKNELYQILKTQSEFHEELRDKQLYIACLNELYPNNEPRRNSISTRDFCHLFIEDIIFYQRPLKSKKSLIDNCPYEENRYIDKESGEIKHASIKCIAKSHPLYQEFRLWQFIVNLRIYRKETDVDVTQELLPTEADYVTLFEWLNEKKEIDQKAFFKYPPFGFKKTTSNYRWNYVEDKPYPCNETHAQIIARLGKAHIPKAFLSKEKEETLWHILYSIEDKQEIEKALHSFANKNNLSEEFIEQFKNFPPFKKEYGSYSAKAIKKLLPLMRMGKYWSIENIDNGTRIRINKIIDGEYDENIRERVRQKAINLTDITHFRALPLWLACYLVYDRHSEVKDIVKWKTPKDIDLYLKSFKQHSLRNPIVEQVITETLRTVRDIWQQVGHIDEIHIELGREMKNPADKRARMSQQMIKNENTNLRIKALLTEFLNPEFGIENVRPYSPSQQDLLRIYEEGVLNSILELPEDIGIILGKFNQTDTLKRPTRSEILRYKLWLEQKYRSPYTGEMIPLSKLFTPAYEIEHIIPQSRYFDDSLSNKVICESEINKLKDRSLGYEFIKNHHGEKVELAFDKPVEVLSVEAYEKLVHESYSHNRSKMKKLLMEDIPDQFIERQLNDSRYISKVVKSLLSNIVREENEQEAISKNVIPCTGGITDRLKKDWGINDVWNKIVLPRFIRLNELTESTRFTSINTNNTMIPSMPLELQKGFNKKRIDHRHHAMDAIIIACANRNIVNYLNNVSASKNTKITRRDLQTLLCHKDKTDNNGNYKWVIDKPWETFTQDTLTALQKITVSFKQNLRVINKTTNHYQHYENGKKIVSNQSKGDSWAIRKSMHKETVHGEVNLRMIKTVSFNEALKKPQAIVEMDLKKKILAMLELGYDTKRIKNYFEENKDTWQDINPSKIKVYYFTKETKDRYFAVRKPIDTSFDKKKIKESITDTGIQQIMLRHLETKDNDPTLAFSPDGIDEMNRNILILNKGKKHQPIYKVRVYEKAEKFTVGQKGNKRTKFVEAAKGTNLFFAIYETEEIDKDTKKVIRKRSYSTIPLNVVIERQKQGLSSAPEDENGNLPKYILSPNDLVYVPTQEEINKGEVVMPIDRDRIYKMVDSSGITANFIPASTANLIFALPKATAEIYCNGENCIQNEYGIGSPQSKNQKAITGEMVKEICFPIKVDRLGNIIQVGSCILTN

SEQ ID NO: 40 - protein, 1101 aa, Akkermansia muciniphila
  source 1..1101: note = ATCC BAA835
MSRSLTFSFDIGYASIGWAVIASASHDDADPSVCGCGTVLFPKDDCQAFKRREYRRLRRNIRSRRVRIERIGRLLVQAQIITPEMKETSGHPAPFYLASEALKGHRTLAPIELWHVLRWYAHNRGYDNNASWSNSLSEDGGNGEDTERVKHAQDLMDKHGTATMAETICRELKLEEGKADAPMEVSTPAYKNLNTAFPRLIVEKEVRRILELSAPLIPGLTAEIIELIAQHHPLTTEQRGVLLQHGIKLARRYRGSLLFGQLIPRFDNRIISRCPVTWAQVYEAELKKGNSEQSARERAEKLSKVPTANCPEFYEYRMARILCNIRADGEPLSAEIRRELMNQARQEGKLTKASLEKAISSRLGKETETNVSNYFTLHPDSEEALYLNPAVEVLQRSGIGQILSPSVYRIAANRLRRGKSVTPNYLLNLLKSRGESGEALEKKIEKESKKKEADYADTPLKPKYATGRAPYARTVLKKVVEEILDGEDPTRPARGEAHPDGELKAHDGCLYCLLDTDSSVNQHQKERRLDTMTNNHLVRHRMLILDRLLKDLIQDFADGQKDRISRVCVEVGKELTTFSAMDSKKIQRELTLRQKSHTDAVNRLKRKLPGKALSANLIRKCRIAMDMNWTCPFTGATYGDHELENLELEHIVPHSFRQSNALSSLVLTWPGVNRMKGQRTGYDFVEQEQENPVPDKPNLHICSLNNYRELVEKLDDKKGHEDDRRRKKKRKALLMVRGLSHKHQSQNHEAMKEIGMTEGMMTQSSHLMKLACKSIKTSLPDAHIDMIPGAVTAEVRKAWDVFGVFKELCPEAADPDSGKILKENLRSLTHLHHALDACVLGLIPYIIPAHHNGLLRRVLAMRRIPEKLIPQVRPVANQRHYVLNDDGRMMLRDLSASLKENIREQLMEQRVIQHVPADMGGALLKETMQRVLSVDGSGEDAMVSLSKKKDGKKEKNQVKASKLVGVFPEGPSKLKALKAAIEIDGNYGVALDPKPVVIRHIKVFKRIMALKEQNGGKPVRILKKGMLIHLTSSKDPKHAGVWRIESIQDSKGGVKLDLQRAHCAVPKNKTHECNWREVDLISLLKKYQMKRYPTSYTGTPR

SEQ ID NO: 41 - protein, 1424 aa, Prevotella sp.
  source 1..1424: note = C561
MTQKVLGLDLGTNSIGSAVRNLDLSDDLQWQLEFFSSDIFRSSVNKESNGREYSLAAQRSAHRRSRGLNEVRRRRLWATLNLLIKHGFCPMSSESLMRWCTYDKRKGLFREYPIDDKDFNAWILLDFNGDGRPDYSSPYQLRRELVTRQFDFEQPIERYKLGRALYHIAQHRGFKSSKGETLSQQETNSKPSSTDEIPDVAGAMKASEEKLSKGLSTYMKEHNLLTVGAAFAQLEDEGVRVRNNNDYRAIRSQFQHEIETIFKFQQGLSVESELYERLISEKKNVGTIFYKRPLRSQRGNVGKCTLERSKPRCAIGHPLFEKFRAWTLINNIKVRMSVDTLDEQLPMKLRLDLYNECFLAFVRTEFKFEDIRKYLEKRLGIHFSYNDKTINYKDSTSVAGCPITARFRKMLGEEWESFRVEGQKERQAHSKNNISFHRVSYSIEDIWHFCYDAEEPEAVLAFAQETLRLERKKAEELVRIWSAMPQGYAMLSQKAIRNINKILMLGLKYSDAVILAKVPELVDVSDEELLSIAKDYYLVEAQVNYDKRINSIVNGLIAKYKSVSEEYRFADHNYEYLLDESDEKDIIRQIENSLGARRWSLMDANEQTDILQKVRDRYQDFFRSHERKFVESPKLGESFENYLTKKFPMVEREQWKKLYHPSQITIYRPVSVGKDRSVLRLGNPDIGAIKNPTVLRVLNTLRRRVNQLLDDGVISPDETRVVVETARELNDANRKWALDTYNRIRHDENEKIKKILEEFYPKRDGISTDDIDKARYVIDQREVDYFTGSKTYNKDIKKYKFWLEQGGQCMYTGRTINLSNLFDPNAFDIEHTIPESLSFDSSDMNLTLCDAHYNRFIKKNHIPTDMPNYDKAITIDGKEYPAITSQLQRWVERVERLNRNVEYWKGQARRAQNKDRKDQCMREMHLWKMELEYWKKKLERFTVTEVTDGFKNSQLVDTRVITRHAVLYLKSIFPHVDVQRGDVTAKFRKILGIQSVDEKKDRSLHSHHAIDATTLTIIPVSAKRDRMLELFAKIEEINKMLSFSGSEDRTGLIQELEGLKNKLQMEVKVCRIGHNVSEIGTFINDNIIVNHHIKNQALTPVRRRLRKKGYIVGGVDNPRWQTGDALRGEIHKASYYGAITQFAKDDEGKVLMKEGRPQVNPTIKFVIRRELKYKKSAADSGFASWDDLGKAIVDKELFALMKGQFPAETSFKDACEQGIYMIKKGKNGMPDIKLHHIRHVRCEAPQSGLKIKEQTYKSEKEYKRYFYAAVGDLYAMCCYTNGKIREFRIYSLYDVSCHRKSDIEDIPEFITDKKGNRLMLDYKLRTGDMILLYKDNPAELYDLDNVNLSRRLYKINRFESQSNLVLMTHHLSTSKERGRSLGKTVDYQNLPESIRSSVKSLNFLIMGENRDFVIKNGKIIFNHR

SEQ ID NO: 42 - protein, 1409 aa, Wolinella succinogenes
  source 1..1409: note = DSM 1740
MLVSPISVDLGGKNTGFFSFTDSLDNSQSGTVIYDESFVLSQVGRRSKRHSKRNNLRNKLVKRLFLLILQEHHGLSIDVLPDEIRGLFNKRGYTYAGFELDEKKKDALESDTLKEFLSEKLQSIDRDSDVEDFLNQIASNAESFKDYKKGFEAVFASATHSPNKKLELKDELKSEYGENAKELLAGLRVTKEILDEFDKQENQGNLPRAKYFEELGEYIATNEKVKSFFDSNSLKLTDMTKLIGNISNYQLKELRRYFNDKEMEKGDIWIPNKLHKITERFVRSWHPKNDADRQRRAELMKDLKSKEIMELLTTTEPVMTIPPYDDMNNRGAVKCQTLRLNEEYLDKHLPNWRDIAKRLNHGKFNDDLADSTVKGYSEDSTLLHRLLDTSKEIDIYELRGKKPNELLVKTLGQSDANRLYGFAQNYYELIRQKVRAGIWVPVKNKDDSLNLEDNSNMLKRCNHNPPHKKNQIHNLVAGILGVKLDEAKFAEFEKELWSAKVGNKKLSAYCKNIEELRKTHGNTFKIDIEELRKKDPAELSKEEKAKLRLTDDVILNEWSQKIANFFDIDDKHRQRFNNLFSMAQLHTVIDTPRSGFSSTCKRCTAENRFRSETAFYNDETGEFHKKATATCQRLPADTQRPFSGKIERYIDKLGYELAKIKAKELEGMEAKEIKVPIILEQNAFEYEESLRKSKTGSNDRVINSKKDRDGKKLAKAKENAEDRLKDKDKRIKAFSSGICPYCGDTIGDDGEIDHILPRSHTLKIYGTVFNPEGNLIYVHQKCNQAKADSIYKLSDIKAGVSAQWIEEQVANIKGYKTFSVLSAEQQKAFRYALFLQNDNEAYKKVVDWLRTDQSARVNGTQKYLAKKIQEKLTKMLPNKHLSFEFILADATEVSELRRQYARQNPLLAKAEKQAPSSHAIDAVMAFVARYQKVFKDGTPPNADEVAKLAMLDSWNPASNEPLTKGLSTNQKIEKMIKSGDYGQKNMREVFGKSIFGENAIGERYKPIVVQEGGYYIGYPATVKKGYELKNCKVVTSKNDIAKLEKIIKNQDLISLKENQYIKIFSINKQTISELSNRYFNMNYKNLVERDKEIVGLLEFIVENCRYYTKKVDVKFAPKYIHETKYPFYDDWRRFDEAWRYLQENQNKTSSKDRFVIDKSSLNEYYQPDKNEYKLDVDTQPIWDDFCRWYFLDRYKTANDKKSIRIKARKTFSLLAESGVQGKVFRAKRKIPTGYAYQALPMDNNVIAGDYANILLEANSKTLSLVPKSGISIEKQLDKKLDVIKKTDVRGLAIDNNSFFNADFDTHGIRLIVENTSVKVGNFPISAIDKSAKRMIFRALFEKEKGKRKKKTTISFKESGPVQDYLKVFLKKIVKIQLRTDGSISNIVVRKNAADFTLSFRSEHIQKLLK

SEQ ID NO: 43 - protein, 1146 aa, Alicyclobacillus hesperidum
  source 1..1146: note = URH17368
MAYRLGLDIGITSVGWAVVALEKDESGLKPVRIQDLGVRIFDKAEDSKTGASLALPRREARSARRRTRRRRHRLWRVKRLLEQHGILSMEQIEALYAQRTSSPDVYALRVAGLDRCLIAEEIARVLIHIAHRRGFQSNRKSEIKDSDAGKLLKAVQENENLMQSKGYRTVAEMLVSEATKTDAEGKLVHGKKHGYVSNVRNKAGEYRHTVSRQAIVDEVRKIFAAQRALGNDVMSEELEDSYLKILCSQRNFDDGPGGDSPYGHGSVSPDGVRQSIYERMVGSCTFETGEKRAPRSSYSFERFQLLTKVVNLRIYRQQEDGGRYPCELTQTERARVIDCAYEQTKITYGKLRKLLDMKDTESFAGLTYGLNRSRNKTEDTVFVEMKFYHEVRKALQRAGVFIQDLSIETLDQIGWILSVWKSDDNRRKKLSTLGLSDNVIEELLPLNGSKFGHLSLKAIRKILPFLEDGYSYDVACELAGYQFQGKTEYVKQRLLPPLGEGEVTNPVVRRALSQAIKVVNAVIRKHGSPESIHIELARELSKNLDERRKIEKAQKENQKNNEQIKDEIREILGSAHVTGRDIVKYKLFKQQQEFCMYSGEKLDVTRLFEPGYAEVDHIIPYGISFDDSYDNKVLVKTEQNRQKGNRTPLEYLRDKPEQKAKFIALVESIPLSQKKKNHLLMDKRAIDLEQEGFRERNLSDTRYITRALMNHIQAWLLFDETASTRSKRVVCVNGAVTAYMRARWGLTKDRDAGDKHHAADAVVVACIGDSLIQRVTKYDKFKRNALADRNRYVQQVSKSEGITQYVDKETGEVFTWESFDERKFLPNEPLEPWPFFRDELLARLSDDPSKNIRAIGLLTYSETEQIDPIFVSRMPTRKVTGAAHKETIRSPRIVKVDDNKGTEIQVVVSKVALTELKLTKDGEIKDYFRPEDDPRLYNTLRERLVQFGGDAKAAFKEPVYKISKDGSVRTPVRKVKIQEKLTLGVPVHGGRGIAENGGMVRIDVFAKGGKYYFVPIYVADVLKRELPNRLATAHKPYSEWRVVDDSYQFKFSLYPNDAVMIKPSREVDITYKDRKEPVGCRIMYFVSANIASASISLRTHDNSGELEGLGIQGLEVFEKYVVGPLGDTHPVYKERRMPFRVERKMN

SEQ ID NO: 44 - protein, 1442 aa, Caenispirillum sp.
  source 1..1442: note = Caenispirillum salinarum AK4
MPVLSPLSPNAAQGRRRWSLALDIGEGSIGWAVAEVDAEGRVLQLTGTGVTLFPSAWSNENGTYVAHGAADRAVRGQQQRHDSRRRRLAGLARLCAPVLERSPEDLKDLTRTPPKADPRAIFFLRADAARRPLDGPELFRVLHHMAAHRGIRLAELQEVDPPPESDADDAAPAATEDEDGTRRAAADERAFRRLMAEHMHRHGTQPTCGEIMAGRLRETPAGAQPVTRARDGLRVGGGVAVPTRALIEQEFDAIRAIQAPRHPDLPWDSLRRLVLDQAPIAVPPATPCLFLEELRRRGETFQGRTITREAIDRGLTVDPLIQALRIRETVGNLRLHERITEPDGRQRYVPRAMPELGLSHGELTAPERDTLVRALMHDPDGLAAKDGRIPYTRLRKLIGYDNSPVCFAQERDTSGGGITVNPTDPLMARWIDGWVDLPLKARSLYVRDVVARGADSAALARLLAEGAHGVPPVAAAAVPAATAAILESDIMQPGRYSVCPWAAEAILDAWANAPTEGFYDVTRGLFGFAPGEIVLEDLRRARGALLAHLPRTMAAARTPNRAAQQRGPLPAYESVIPSQLITSLRRAHKGRAADWSAADPEERNPFLRTWTGNAATDHILNQVRKTANEVITKYGNRRGWDPLPSRITVELAREAKHGVIRRNEIAKENRENEGRRKKESAALDTFCQDNTVSWQAGGLPKERAALRLRLAQRQEFFCPYCAERPKLRATDLFSPAETEIDHVIERRMGGDGPDNLVLAHKDCNNAKGKKTPHEHAGDLLDSPALAALWQGWRKENADRLKGKGHKARTPREDKDFMDRVGWRFEEDARAKAEENQERRGRRMLHDTARATRLARLYLAAAVMPEDPAEIGAPPVETPPSPEDPTGYTAIYRTISRVQPVNGSVTHMLRQRLLQRDKNRDYQTHHAEDACLLLLAGPAVVQAFNTEAAQHGADAPDDRPVDLMPTSDAYHQQRRARALGRVPLATVDAALADIVMPESDRQDPETGRVHWRLTRAGRGLKRRIDDLTRNCVILSRPRRPSETGTPGALHNATHYGRREITVDGRTDTVVTQRMNARDLVALLDNAKIVPAARLDAAAPGDTILKEICTEIADRHDRVVDPEGTHARRWISARLAALVPAHAEAVARDIAELADLDALADADRTPEQEARRSALRQSPYLGRAISAKKADGRARAREQEILTRALLDPHWGPRGLRHLIMREARAPSLVRIRANKTDAFGRPVPDAAVWVKTDGNAVSQLWRLTSVVTDDGRRIPLPKPIEKRIEISNLEYARLNGLDEGAGVTGNNAPPRPLRQDIDRLTPLWRDHGTAPGGYLGTAVGELEDKARSALRGKAMRQTLTDAGITAEAGWRLDSEGAVCDLEVAKGDTVKKDGKTYKVGVITQGIFGMPVDAAGSAPRTPEDCEKFEEQYGIKPWKAKGIPLA

SEQ ID NO: 45 - protein, 1114 aa, Eubacterium rectale
  source 1..1114: note = ATCC 33656
MNYTEKEKLFMKYILALDIGIASVGWAILDKESETVIEAGSNIFPEASAADNQLRRDMRGAKRNNRRLKTRINDFIKLWENNNLSIPQFKSTEIVGLKVRAITEEITLDELYLILYSYLKHRGISYLEDALDDTVSGSSAYANGLKLNAKELETHYPCEIQQERLNTIGKYRGQSQIINENGEVLDLSNVFTIGAYRKEIQRVFEIQKKYHPELTDEFCDGYMLIFNRKRKYYEGPGNEKSRTDYGRFTTKLDANGNYITEDNIFEKLIGKCSVYPDELRAAAASYTAQEYNVLNDLNNLTINGRKLEENEKHEIVERIKSSNTINMRKIISDCMGENIDDFAGARIDKSGKEIFHKFEVYNKMRKALLEIGIDISNYSREELDEIGYIMTINTDKEAMMEAFQKSWIDLSDDVKQCLINMRKTNGALFNKWQSFSLKIMNELIPEMYAQPKEQMTLLTEMGVTKGTQEEFAGLKYIPVDVVSEDIFNPVVRRSVRISFKILNAVLKKYKALDTIVIEMPRDRNSEEQKKRINDSQKLNEKEMEYIEKKLAVTYGIKLSPSDFSSQKQLSLKLKLWNEQDGICLYSGKTIDPNDIINNPQLFEIDHIIPRSISFDDARSNKVLVYRSENQKKGNQTPYYYLTHSHSEWSFEQYKATVMNLSKKKEYAISRKKIQNLLYSEDITKMDVLKGFINRNINDTSYASRLVLNTIQNFFMANEADTKVKVIKGSYTHQMRCNLKLDKNRDESYSHHAVDAMLIGYSELGYEAYHKLQGEFIDFETGEILRKDMWDENMSDEVYADYLYGKKWANIRNEVVKAEKNVKYWHYVMRKSNRGLCNQTIRGTREYDGKQYKINKLDIRTKEGIKVFAKLAFSKKDSDRERLLVYLNDRRTFDDLCKIYEDYSDAANPFVQYEKETGDIIRKYSKKHNGPRIDKLKYKDGEVGACIDISHKYGFEKGSKKVILESLVPYRMDVYYKEENHSYYLVGVKQSDIKFEKGRNVIDEEAYARILVNEKMIQPGQSRADLENLGFKFKLSFYKNDIIEYEKDGKIYTERLVSRTMPKQRNYIETKPIDKAKFEKQNLVGLGKTKFIKKYRYDILGNKYSCSEEKFTSFC

SEQ ID NO: 46 - protein, 1314 aa, Mycoplasma synoviae
  source 1..1314: note = 53
MLRLYCANNLVLNNVQNLWKYLLLLIFDKKIIFLFKIKVILIRRYMENNNKEKIVIGFDLGVASVGWSIVNAETKEVIDLGVRLFSEPEKADYRRAKRTTRRLLRRKKFKREKFHKLILKNAEIFGLQSRNEILNVYKDQSSKYRNILKLKINALKEEIKPSELVWILRDYLQNRGYFYKNEKLTDEFVSNSFPSKKLHEHYEKYGFFRGSVKLDNKLDNKKDKAKEKDEEEESDAKKESEELIFSNKQWINEIVKVFENQSYLTESFKEEYLKLFNYVRPFNKGPGSKNSRTAYGVFSTDIDPETNKFKDYSNIWDKTIGKCSLFEEEIRAPKNLPSALIFNLQNEICTIKNEFTEFKNWWLNAEQKSEILKFVFTELFNWKDKKYSDKKFNKNLQDKIKKYLLNFALENFNLNEEILKNRDLENDTVLGLKGVKYYEKSNATADAALEFSSLKPLYVFIKFLKEKKLDLNYLLGLENTEILYFLDSIYLAISYSSDLKERNEWFKKLLKELYPKIKNNNLEIIENVEDIFEITDQEKFESFSKTHSLSREAFNHIIPLLLSNNEGKNYESLKHSNEELKKRTEKAELKAQQNQKYLKDNFLKEALVPLSVKTSVLQAIKIFNQIIKNFGKKYEISQVVIEMARELTKPNLEKLLNNATNSNIKILKEKLDQTEKFDDFTKKKFIDKIENSVVFRNKLFLWFEQDRKDPYTQLDIKINEIEDETEIDHVIPYSKSADDSWFNKLLVKKSTNQLKKNKTVWEYYQNESDPEAKWNKFVAWAKRIYLVQKSDKESKDNSEKNSIFKNKKPNLKFKNITKKLFDPYKDLGFLARNLNDTRYATKVFRDQLNNYSKHHSKDDENKLFKVVCMNGSITSFLRKSMWRKNEEQVYRFNFWKKDRDQFFHHAVDASIIAIFSLLTKTLYNKLRVYESYDVQRREDGVYLINKETGEVKKADKDYWKDQHNFLKIRENAIEIKNVLNNVDFQNQVRYSRKANTKLNTQLFNETLYGVKEFENNFYKLEKVNLFSRKDLRKFILEDLNEESEKNKKNENGSRKRILTEKYIVDEILQILENEEFKDSKSDINALNKYMDSLPSKFSEFFSQDFINKCKKENSLILTFDAIKHNDPKKVIKIKNLKFFREDATLKNKQAVHKDSKNQIKSFYESYKCVGFIWLKNKNDLEESIFVPINSRVIHFGDKDKDIFDFDSYNKEKLLNEINLKRPENKKFNSINEIEFVKFVKPGALLLNFENQQIYYISTLESSSLRAKIKLLNKMDKGKAVSMKKITNPDEYKIIEHVNPLGINLNWTKKLENNN

SEQ ID NO: 47 - protein, 1197 aa, Porphyromonas sp.
  source 1..1197: note = oral taxon 279 str. F0450
MLMSKHVLGLDLGVGSIGWCLIALDAQGDPAEILGMGSRVVPLNNATKAIEAFNAGAAFTASQERTARRTMRRGFARYQLRRYRLRRELEKVGMLPDAALIQLPLLELWELRERAATAGRRLTLPELGRVLCHINQKRGYRHVKSDAAAIVGDEGEKKKDSNSAYLAGIRANDEKLQAEHKTVGQYFAEQLRQNQSESPTGGISYRIKDQIFSRQCYIDEYDQIMAVQRVHYPDILTDEFIRMLRDEVIFMQRPLKSCKHLVSLCEFEKQERVMRVQQDDGKGGWQLVERRVKFGPKVAPKSSPLFQLCCIYEAVNNIRLTRPNGSPCDITPEERAKIVAHLQSSASLSFAALKKLLKEKALIADQLTSKSGLKGNSTRVALASALQPYPQYHHLLDMELETRMMTVQLTDEETGEVTEREVAVVTDSYVRKPLYRLWHILYSIEEREAMRRALITQLGMKEEDLDGGLLDQLYRLDFVKPGYGNKSAKFICKLLPQLQQGLGYSEACAAVGYRHSNSPTSEEITERTLLEKIPLLQRNELRQPLVEKILNQMINLVNALKAEYGIDEVRVELARELKMSREERERMARNNKDREERNKGVAAKIRECGLYPTKPRIQKYMLWKEAGRQCLYCGRSIEEEQCLREGGMEVEHIIPKSVLYDDSYGNKTCACRRCNKEKGNRTALEYIRAKGREAEYMKRINDLLKEKKISYSKHQRLRWLKEDIPSDFLERQLRLTQYISRQAMAILQQGIRRVSASEGGVTARLRSLWGYGKILHTLNLDRYDSMGETERVSREGEATEELHITNWSKRMDHRHHAIDALVVACTRQSYIQRLNRLSSEFGREDKKKEDQEAQEQQATETGRLSNLERWLTQRPHFSVRTVSDKVAEILISYRPGQRVVTRGRNIYRKKMADGREVSCVQRGVLVPRGELMEASFYGKILSQGRVRIVKRYPLHDLKGEVVDPHLRELITTYNQELKSREKGAPIPPLCLDKDKKQEVRSVRCYAKTLSLDKAIPMCFDEKGEPTAFVKSASNHHLALYRTPKGKLVESIVTFWDAVDRARYGIPLVITHPREVMEQVLQRGDIPEQVLSLLPPSDWVFVDSLQQDEMVVIGLSDEELQRALEAQNYRKISEHLYRVQKMSSSYYVFRYHLETSVADDKNTSGRIPKFHRVQSLKAYEERNIRKVRVDLLGRISLL

SEQ ID NO: 48 - protein, 1121 aa, Streptococcus thermophilus
  source 1..1121: note = LMD9
MSDLVLGLDIGIGSVGVGILNKVTGEIIHKNSRIFPAAQAENNLVRRTNRQGRRLARRKKHRRVRLNRLFEESGLITDFTKISINLNPYQLRVKGLTDELSNEELFIALKNMVKHRGISYLDDASDDGNSSVGDYAQIVKENSKQLETKTPGQIQLERYQTYGQLRGDFTVEKDGKKHRLINVFPTSAYRSEALRILQTQQEFNPQITDEFINRYLEILTGKRKYYHGPGNEKSRTDYGRYRTSGETLDNIFGILIGKCTFYPDEFRAAKASYTAQEFNLLNDLNNLTVPTETKKLSKEQKNQIINYVKNEKAMGPAKLFKYIAKLLSCDVADIKGYRIDKSGKAEIHTFEAYRKMKTLETLDIEQMDRETLDKLAYVLTLNTEREGIQEALEHEFADGSFSQKQVDELVQFRKANSSIFGKGWHNFSVKLMMELIPELYETSEEQMTILTRLGKQKTTSSSNKTKYIDEKLLTEEIYNPVVAKSVRQAIKIVNAAIKEYGDFDNIVIEMARETNEDDEKKAIQKIQKANKDEKDAAMLKAANQYNGKAELPHSVFHGHKQLATKIRLWHQQGERCLYTGKTISIHDLINNSNQFEVDHILPLSITFDDSLANKVLVYATANQEKGQRTPYQALDSMDDAWSFRELKAFVRESKTLSNKKKEYLLTEEDISKFDVRKKFIERNLVDTRYASRVVLNALQEHFRAHKIDTKVSVVRGQFTSQLRRHWGIEKTRDTYHHHAVDALIIAASSQLNLWKKQKNTLVSYSEDQLLDIETGELISDDEYKESVFKAPYQHFVDTLKSKEFEDSILFSYQVDSKFNRKISDATIYATRQAKVGKDKADETYVLGKIKDIYTQDGYDAFMKIYKKDKSKFLMYRHDPQTFEKVIEPILENYPNKQINEKGKEVPCNPFLKYKEEHGYIRKYSKKGNGPEIKSLKYYDSKLGNHIDITPKDSNNKVVLQSVSPWRADVYFNKTTGKYEILGLKYADLQFEKGTGTYKISQEKYNDIKKKEGVDSDSEFKFTLYKNDLLLVKDTETKEQQLFRFLSRTMPKQKHYVELKPYDKQKFEGGEALIKVLGNVANSGQCKKGLGKSNISIYKVRTDVLGNQHIIKNEGDKPKLDF

SEQ ID NO: 49 - protein, 1152 aa, Roseburia inulinivorans
  source 1..1152: note = DSM 16841
MNAEHGKEGLLIMEENFQYRIGLDIGITSVGWAVLQNNSQDEPVRITDLGVRIFDVAENPKNGDALAAPRRDARTTRRRLRRRRHRLERIKFLLQENGLIEMDSFMERYYKGNLPDVYQLRYEGLDRKLKDEELAQVLIHIAKHRGFRSTRKAETKEKEGGAVLKATTENQKIMQEKGYRTVGEMLYLDEAFHTECLWNEKGYVLTPRNRPDDYKHTILRSMLVEEVHAIFAAQRAHGNQKATEGLEEAYVEIMTSQRSFDMGPGLQPDGKPSPYAMEGFGDRVGKCTFEKDEYRAPKATYTAELFVALQKINHTKLIDEFGTGRFFSEEERKTIIGLLLSSKELKYGTIRKKLNIDPSLKFNSLNYSAKKEGETEEERVLDTEKAKFASMFWTYEYSKCLKDRTEEMPVGEKADLFDRIGEILTAYKNDDSRSSRLKELGLSGEEIDGLLDLSPAKYQRVSLKAMRKMQPYLEDGLIYDKACEAAGYDFRALNDGNKKHLLKGEEINAIVNDITNPVVKRSVSQTIKVINAIIQKYGSPQAVNIELAREMSKNFQDRTNLEKEMKKRQQENERAKQQIIELGKQNPTGQDILKYRLWNDQGGYCLYSGKKIPLEELFDGGYDIDHILPYSITFDDSYRNKVLVTAQENRQKGNRTPYEYFGADEKRWEDYEASVRLLVRDYKKQQKLLKKNFTEEERKEFKERNLNDTKYITRVVYNMIRQNLELEPFNHPEKKKQVWAVNGAVTSYLRKRWGLMQKDRSTDRHHAMDAVVIACCTDGMIHKISRYMQGRELAYSRNFKFPDEETGEILNRDNFTREQWDEKFGVKVPLPWNSFRDELDIRLLNEDPKNFLLTHADVQRELDYPGWMYGEEESPIEEGRYINYIRPLFVSRMPNHKVTGSAHDATIRSARDYETRGVVITKVPLTDLKLNKDNEIEGYYDKDSDRLLYQALVRQLLLHGNDGKKAFAEDFHKPKADGTEGPVVRKVKIEKKQTSGVMVRGGTGIAANGEMVRIDVFRENGKYYFVPVYTADVVRKVLPNRAATHTKPYSEWRVMDDANFVFSLYSRDLIHVKSKKDIKTNLVNGGLLLQKEIFAYYTGADIATASIAGFANDSNFKFRGLGIQSLEIFEKCQVDILGNISVVRHENRQEFH

SEQ ID NO: 50 - protein, 1082 aa, Methylosinus trichosporium
  source 1..1082: note = OB3b
MRVLGLDAGIASLGWALIEIEESNRGELSQGTIIGAGTWMFDAPEEKTQAGAKLKSEQRRTFRGQRRVVRRRRQRMNEVRRILHSHGLLPSSDRDALKQPGLDPWRIRAEALDRLLGPVELAVALGHIARHRGFKSNSKGAKTNDPADDTSKMKRAVNETREKLARFGSAAKMLVEDESFVLRQTPTKNGASEIVRRFRNREGDYSRSLLRDDLAAEMRALFTAQARFQSAIATADLQTAFTKAAFFQRPLQDSEKLVGPCPFEVDEKRAPKRGYSFELFRFLSRLNHVTLRDGKQERTLTRDELALAAADFGAAAKVSFTALRKKLKLPETTVFVGVKADEESKLDVVARSGKAAEGTARLRSVIVDALGELAWGALLCSPEKLDKIAEVISFRSDIGRISEGLAQAGCNAPLVDALTAAASDGRFDPFTGAGHISSKAARNILSGLRQGMTYDKACCAADYDHTASRERGAFDVGGHGREALKRILQEERISRELVGSPTARKALIESIKQVKAIVERYGVPDRIHVELARDVGKSIEEREEITRGIEKRNRQKDKLRGLFEKEVGRPPQDGARGKEELLRFELWSEQMGRCLYTDDYISPSQLVATDDAVQVDHILPWSRFADDSYANKTLCMAKANQDKKGRTPYEWFKAEKTDTEWDAFIVRVEALADMKGFKKRNYKLRNAEEAAAKFRNRNLNDTRWACRLLAEALKQLYPKGEKDKDGKERRRVFSRPGALTDRLRRAWGLQWMKKSTKGDRIPDDRHHALDAIVIAATTESLLQRATREVQEIEDKGLHYDLVKNVTPPWPGFREQAVEAVEKVFVARAERRRARGKAHDATIRHIAVREGEQRVYERRKVAELKLADLDRVKDAERNARLIEKLRNWIEAGSPKDDPPLSPKGDPIFKVRLVTKSKVNIALDTGNPKRPGTVDRGEMARVDVFRKASKKGKYEYYLVPIYPHDIATMKTPPIRAVQAYKPEDEWPEMDSSYEFCWSLVPMTYLQVISSKGEIFEGYYRGMNRSVGAIQLSAHSNSSDVVQGIGARTLTEFKKFNVDRFGRKHEVERELRTWRGETWRGKAYI

SEQ ID NO: 51 - protein, 1156 aa, Ruminococcus albus
  source 1..1156: note = 8
MGNYYLGLDVGIGSIGWAVINIEKKRIEDFNVRIFKSGEIQEKNRNSRASQQCRRSRGLRRLYRRKSHRKLRLKNYLSIIGLTTSEKIDYYYETADNNVIQLRNKGLSEKLTPEEIAACLIHICNNRGYKDFYEVNVEDIEDPDERNEYKEEHDSIVLISNLMNEGGYCTPAEMICNCREFDEPNSVYRKFHNSAASKNHYLITRHMLVKEVDLILENQSKYYGILDDKTIAKIKDIIFAQRDFEIGPGKNERFRRFTGYLDSIGKCQFFKDQERGSRFTVIADIYAFVNVLSQYTYTNNRGESVFDTSFANDLINSALKNGSMDKRELKAIAKSYHIDISDKNSDTSLTKCFKYIKVVKPLFEKYGYDWDKLIENYTDTDNNVLNRIGIVLSQAQTPKRRREKLKALNIGLDDGLINELTKLKLSGTANVSYKYMQGSIEAFCEGDLYGKYQAKFNKEIPDIDENAKPQKLPPFKNEDDCEFFKNPVVFRSINETRKLINAIIDKYGYPAAVNIETADELNKTFEDRAIDTKRNNDNQKENDRIVKEIIECIKCDEVHARHLIEKYKLWEAQEGKCLYSGETITKEDMLRDKDKLFEVDHIVPYSLILDNTINNKALVYAEENQKKGQRTPLMYMNEAQAADYRVRVNTMFKSKKCSKKKYQYLMLPDLNDQELLGGWRSRNLNDTRYICKYLVNYLRKNLRFDRSYESSDEDDLKIRDHYRVFPVKSRFTSMFRRWWLNEKTWGRYDKAELKKLTYLDHAADAIIIANCRPEYVVLAGEKLKLNKMYHQAGKRITPEYEQSKKACIDNLYKLFRMDRRTAEKLLSGHGRLTPIIPNLSEEVDKRLWDKNIYEQFWKDDKDKKSCEELYRENVASLYKGDPKFASSLSMPVISLKPDHKYRGTITGEEAIRVKEIDGKLIKLKRKSISEITAESINSIYTDDKILIDSLKTIFEQADYKDVGDYLKKTNQHFFTTSSGKRVNKVTVIEKVPSRWLRKEIDDNNFSLLNDSSYYCIELYKDSKGDNNLQGIAMSDIVHDRKTKKLYLKPDFNYPDDYYTHVMYIFPGDYLRIKSTSKKSGEQLKFEGYFISVKNVNENSFRFISDNKPCAKDKRVSITKKDIVIKLAVDLMGKVQGENNGKGISCGEPLSLLKEKN

SEQ ID NO: 52 - protein, 1187 aa, Bifidobacterium longum
  source 1..1187: note = DJO10A
MLSRQLLGASHLARPVSYSYNVQDNDVHCSYGERCFMRGKRYRIGIDVGLNSVGLAAVEVSDENSPVRLLNAQSVIHDGGVDPQKNKEAITRKNMSGVARRTRRMRRRKRERLHKLDMLLGKFGYPVIEPESLDKPFEEWHVRAELATRYIEDDELRRESISIALRHMARHRGWRNPYRQVDSLISDNPYSKQYGELKEKAKAYNDDATAAEEESTPAQLVVAMLDAGYAEAPRLRWRTGSKKPDAEGYLPVRLMQEDNANELKQIFRVQRVPADEWKPLFRSVFYAVSPKGSAEQRVGQDPLAPEQARALKASLAFQEYRIANVITNLRIKDASAELRKLTVDEKQSIYDQLVSPSSEDITWSDLCDFLGFKRSQLKGVGSLTEDGEERISSRPPRLTSVQRIYESDNKIRKPLVAWWKSASDNEHEAMIRLLSNTVDIDKVREDVAYASAIEFIDGLDDDALTKLDSVDLPSGRAAYSVETLQKLTRQMLTTDDDLHEARKTLFNVTDSWRPPADPIGEPLGNPSVDRVLKNVNRYLMNCQQRWGNPVSVNIEHVRSSFSSVAFARKDKREYEKNNEKRSIFRSSLSEQLRADEQMEKVRESDLRRLEAIQRQNGQCLYCGRTITFRTCEMDHIVPRKGVGSTNTRTNFAAVCAECNRMKSNTPFAIWARSEDAQTRGVSLAEAKKRVTMFTFNPKSYAPREVKAFKQAVIARLQQTEDDAAIDNRSIESVAWMADELHRRIDWYFNAKQYVNSASIDDAEAETMKTTVSVFQGRVTASARRAAGIEGKIHFIGQQSKTRLDRRHHAVDASVIAMMNTAAAQTLMERESLRESQRLIGLMPGERSWKEYPYEGTSRYESFHLWLDNMDVLLELLNDALDNDRIAVMQSQRYVLGNSIAHDATIHPLEKVPLGSAMSADLIRRASTPALWCALTRLPDYDEKEGLPEDSHREIRVHDTRYSADDEMGFFASQAAQIAVQEGSADIGSAIHHARVYRCWKTNAKGVRKYFYGMIRVFQTDLLRACHDDLFTVPLPPQSISMRYGEPRVVQALQSGNAQYLGSLVVGDEIEMDFSSLDVDGQIGEYLQFFSQFSGGNLAWKHWVVDGFFNQTQLRIRPRYLAAEGLAKAFSDDVVPDGVQKIVTKQGWLPPVNTASKTAVRIVRRNAFGEPRLSSAHHMPCSWQWRHE

SEQ ID NO: 53 - protein, 1150 aa, Enterococcus faecalis
  source 1..1150: note = TX0012
MYSIGLDLGISSVGWSVIDERTGNVIDLGVRLFSAKNSEKNLERRTNRGGRRLIRRKTNRLKDAKKILAAVGFYEDKSLKNSCPYQLRVKGLTEPLSRGEIYKVTLHILKKRGISYLDEVDTEAAKESQDYKEQVRKNAQLLTKYTPGQIQLQRLKENNRVKTGINAQGNYQLNVFKVSAYANELATILKTQQAFYPNELTDDWIALFVQPGIAEEAGLIYRKRPYYHGPGNEANNSPYGRWSDFQKTGEPATNIFDKLIGKDFQGELRASGLSLSAQQYNLLNDLTNLKIDGEVPLSSEQKEYILTELMTKEFTRFGVNDVVKLLGVKKERLSGWRLDKKGKPEIHTLKGYRNWRKIFAEAGIDLATLPTETIDCLAKVLTLNTEREGIENTLAFELPELSESVKLLVLDRYKELSQSISTQSWHRFSLKTLHLLIPELMNATSEQNTLLEQFQLKSDVRKRYSEYKKLPTKDVLAEIYNPTVNKTVSQAFKVIDALLVKYGKEQIRYITIEMPRDDNEEDEKKRIKELHAKNSQRKNDSQSYFMQKSGWSQEKFQTTIQKNRRFLAKLLYYYEQDGICAYTGLPISPELLVSDSTEIDHIIPISISLDDSINNKVLVLSKANQVKGQQTPYDAWMDGSFKKINGKFSNWDDYQKWVESRHFSHKKENNLLETRNIFDSEQVEKFLARNLNDTRYASRLVLNTLQSFFTNQETKVRVVNGSFTHTLRKKWGADLDKTRETHHHHAVDATLCAVTSFVKVSRYHYAVKEETGEKVMREIDFETGEIVNEMSYWEFKKSKKYERKTYQVKWPNFREQLKPVNLHPRIKFSHQVDRKANRKLSDATIYSVREKTEVKTLKSGKQKITTDEYTIGKIKDIYTLDGWEAFKKKQDKLLMKDLDEKTYERLLSIAETTPDFQEVEEKNGKVKRVKRSPFAVYCEENDIPAIQKYAKKNNGPLIRSLKYYDGKLNKHINITKDSQGRPVEKTKNGRKVTLQSLKPYRYDIYQDLETKAYYTVQLYYSDLRFVEGKYGITEKEYMKKVAEQTKGQVVRFCFSLQKNDGLEIEWKDSQRYDVRFYNFQSANSINFKGLEQEMMPAENQFKQKPYNNGAINLNIAKYGKEGKKLRKFNTDILGKKHYLFYEKEPKNIIK

SEQ ID NO: 54 - protein, 1236 aa, Mycoplasma mobile
  source 1..1236: note = 163K
MYFYKNKENKLNKKVVLGLDLGIASVGWCLTDISQKEDNKFPIILHGVRLFETVDDSDDKLLNETRRKKRGQRRRNRRLFTRKRDFIKYLIDNNIIELEFDKNPKILVRNFIEKYINPFSKNLELKYKSVTNLPIGFHNLRKAAINEKYKLDKSELIVLLYFYLSLRGAFFDNPEDTKSKEMNKNEIEIFDKNESIKNAEFPIDKIIEFYKISGKIRSTINLKFGHQDYLKEIKQVFEKQNIDFMNYEKFAMEEKSFFSRIRNYSEGPGNEKSFSKYGLYANENGNPELIINEKGQKIYTKIFKTLWESKIGKCSYDKKLYRAPKNSFSAKVFDITNKLTDWKHKNEYISERLKRKILLSRFLNKDSKSAVEKILKEENIKFENLSEIAYNKDDNKINLPIINAYHSLTTIFKKHLINFENYLISNENDLSKLMSFYKQQSEKLFVPNEKGSYEINQNNNVLHIFDAISNILNKFSTIQDRIRILEGYFEFSNLKKDVKSSEIYSEIAKLREFSGTSSLSFGAYYKFIPNLISEGSKNYSTISYEEKALQNQKNNFSHSNLFEKTWVEDLIASPTVKRSLRQTMNLLKEIFKYSEKNNLEIEKIVVEVTRSSNNKHERKKIEGINKYRKEKYEELKKVYDLPNENTTLLKKLWLLRQQQGYDAYSLRKIEANDVINKPWNYDIDHIVPRSISFDDSFSNLVIVNKLDNAKKSNDLSAKQFIEKIYGIEKLKEAKENWGNWYLRNANGKAFNDKGKFIKLYTIDNLDEFDNSDFINRNLSDTSYITNALVNHLTFSNSKYKYSVVSVNGKQTSNLRNQIAFVGIKNNKETEREWKRPEGFKSINSNDFLIREEGKNDVKDDVLIKDRSFNGHHAEDAYFITIISQYFRSFKRIERLNVNYRKETRELDDLEKNNIKFKEKASFDNFLLINALDELNEKLNQMRFSRMVITKKNTQLFNETLYSGKYDKGKNTIKKVEKLNLLDNRTDKIKKIEEFFDEDKLKENELTKLHIFNHDKNLYETLKIIWNEVKIEIKNKNLNEKNYFKYFVNKKLQEGKISFNEWVPILDNDFKIIRKIRYIKFSSEEKETDEIIFSQSNFLKIDQRQNFSFHNTLYWVQIWVYKNQKDQYCFISIDARNSKFEKDEIKINYEKLKTQKEKLQIINEEPILKINKGDLFENEEKELFYIVGRDEKPQKLEIKYILGKKIKDQKQIQKPVKKYFPNWKKVNLTYMGEIFKK

SEQ ID NO: 55 - protein, 1105 aa, Actinomyces coleocanis
  source 1..1105: note = DSM 15436
MDNKNYRIGIDVGLNSIGFCAVEVDQHDTPLGFLNLSVYRHDAGIDPNGKKTNTTRLAMSGVARRTRRLFRKRKRRLAALDRFIEAQGWTLPDHADYKDPYTPWLVRAELAQTPIRDENDLHEKLAIAVRHIARHRGWRSPWVPVRSLHVEQPPSDQYLALKERVEAKTLLQMPEGATPAEMVVALDLSVDVNLRPKNREKTDTRPENKKPGFLGGKLMQSDNANELRKIAKIQGLDDALLRELIELVFAADSPKGASGELVGYDVLPGQHGKRRAEKAHPAFQRYRIASIVSNLRIRHLGSGADERLDVETQKRVFEYLLNAKPTADITWSDVAEEIGVERNLLMGTATQTADGERASAKPPVDVTNVAFATCKIKPLKEWWLNADYEARCVMVSALSHAEKLTEGTAAEVEVAEFLQNLSDEDNEKLDSFSLPIGRAAYSVDSLERLTKRMIENGEDLFEARVNEFGVSEDWRPPAEPIGARVGNPAVDRVLKAVNRYLMAAEAEWGAPLSVNIEHVREGFISKRQAVEIDRENQKRYQRNQAVRSQIADHINATSGVRGSDVTRYLAIQRQNGECLYCGTAITFVNSEMDHIVPRAGLGSTNTRDNLVATCERCNKSKSNKPFAVWAAECGIPGVSVAEALKRVDFWIADGFASSKEHRELQKGVKDRLKRKVSDPEIDNRSMESVAWMARELAHRVQYYFDEKHTGTKVRVFRGSLTSAARKASGFESRVNFIGGNGKTRLDRRHHAMDAATVAMLRNSVAKTLVLRGNIRASERAIGAAETWKSFRGENVADRQIFESWSENMRVLVEKFNLALYNDEVSIFSSLRLQLGNGKAHDDTITKLQMHKVGDAWSLTEIDRASTPALWCALTRQPDFTWKDGLPANEDRTIIVNGTHYGPLDKVGIFGKAAASLLVRGGSVDIGSAIHHARIYRIAGKKPTYGMVRVFAPDLLRYRNEDLFNVELPPQSVSMRYAEPKVREAIREGKAEYLGWLVVGDELLLDLSSETSGQIAELQQDFPGTTHWTVAGFFSPSRLRLRPVYLAQEGLGEDVSEGSKSIIAGQGWRPAVNKVFGSAMPEVIRRDGLGRKRRFSYSGLPVSWQG

SEQ ID NO: 56 - protein, 1079 aa, Dinoroseobacter shibae
  source 1..1079: note = DFL 12
MRLGLDIGTSSIGWWLYETDGAGSDARITGVVDGGVRIFSDGRDPKSGASLAVDRRAARAMRRRRDRYLRRRATLMKVLAETGLMPADPAEAKALEALDPFALRAAGLDEPLPLPHLGRALFHLNQRRGFKSNRKTDRGDNESGKIKDATARLDMEMMANGARTYGEFLHKRRQKATDPRHVPSVRTRLSIANRGGPDGKEEAGYDFYPDRRHLEEEFHKLWAAQGAHHPELTETLRDLLFEKIFFQRPLKEPEVGLCLFSGHHGVPPKDPRLPKAHPLTQRRVLYETVNQLRVTADGREARPLTREERDQVIHALDNKKPTKSLSSMVLKLPALAKVLKLRDGERFTLETGVRDAIACDPLRASPAHPDRFGPRWSILDADAQWEVISRIRRVQSDAEHAALVDWLTEAHGLDRAHAEATAHAPLPDGYGRLGLTATTRILYQLTADVVTYADAVKACGWHHSDGRTGECFDRLPYYGEVLERHVIPGSYHPDDDDITRFGRITNPTVHIGLNQLRRLVNRIIETHGKPHQIVVELARDLKKSEEQKRADIKRIRDTTEAAKKRSEKLEELEIEDNGRNRMLLRLWEDLNPDDAMRRFCPYTGTRISAAMIFDGSCDVDHILPYSRTLDDSFPNRTLCLREANRQKRNQTPWQAWGDTPHWHAIAANLKNLPENKRWRFAPDAMTRFEGENGFLDRALKDTQYLARISRSYLDTLFTKGGHVWVVPGRFTEMLRRHWGLNSLLSDAGRGAVKAKNRTDHRHHAIDAAVIAATDPGLLNRISRAAGQGEAAGQSAELIARDTPPPWEGFRDDLRVRLDRIIVSHRADHGRIDHAARKQGRDSTAGQLHQETAYSIVDDIHVASRTDLLSLKPAQLLDEPGRSGQVRDPQLRKALRVATGGKTGKDFENALRYFASKPGPYQAIRRVRIIKPLQAQARVPVPAQDPIKAYQGGSNHLFEIWRLPDGEIEAQVITSFEAHTLEGEKRPHPAAKRLLRVHKGDMVALERDGRRVVGHVQKMDIANGLFIVPHNEANADTRNNDKSDPFKWIQIGARPAIASGIRRVSVDEIGRLRDGGTRPI

SEQ ID NO: 57 - protein, 1181 aa, Actinomyces sp.
  source 1..1181: note = oral taxon 180 str. F0310
MLHCIAVIRVPPSEEPGFFETHADSCALCHHGCMTYAANDKAIRYRVGIDVGLRSIGFCAVEVDDEDHPIRILNSVVHVHDAGTGGPGETESLRKRSGVAARARRRGRAEKQRLKKLDVLLEELGWGVSSNELLDSHAPWHIRKRLVSEYIEDETERRQCLSVAMAHIARHRGWRNSFSKVDTLLLEQAPSDRMQGLKERVEDRTGLQFSEEVTQGELVATLLEHDGDVTIRGFVRKGGKATKVHGVLEGKYMQSDLVAELRQICRTQRVSETTFEKLVLSIFHSKEPAPSAARQRERVGLDELQLALDPAAKQPRAERAHPAFQKFKVVATLANMRIREQSAGERSLTSEELNRVARYLLNHTESESPTWDDVARKLEVPRHRLRGSSRASLETGGGLTYPPVDDTTVRVMSAEVDWLADWWDCANDESRGHMIDAISNGCGSEPDDVEDEEVNELISSATAEDMLKLELLAKKLPSGRVAYSLKTLREVTAAILETGDDLSQAITRLYGVDPGWVPTPAPIEAPVGNPSVDRVLKQVARWLKFASKRWGVPQTVNIEHTREGLKSASLLEEERERWERFEARREIRQKEMYKRLGISGPFRRSDQVRYEILDLQDCACLYCGNEINFQTFEVDHIIPRVDASSDSRRTNLAAVCHSCNSAKGGLAFGQWVKRGDCPSGVSLENAIKRVRSWSKDRLGLTEKAMGKRKSEVISRLKTEMPYEEFDGRSMESVAWMAIELKKRIEGYFNSDRPEGCAAVQVNAYSGRLTACARRAAHVDKRVRLIRLKGDDGHHKNRFDRRNHAMDALVIALMTPAIARTIAVREDRREAQQLTRAFESWKNFLGSEERMQDRWESWIGDVEYACDRLNELIDADKIPVTENLRLRNSGKLHADQPESLKKARRGSKRPRPQRYVLGDALPADVINRVTDPGLWTALVRAPGFDSQLGLPADLNRGLKLRGKRISADFPIDYFPTDSPALAVQGGYVGLEFHHARLYRIIGPKEKVKYALLRVCAIDLCGIDCDDLFEVELKPSSISMRTADAKLKEAMGNGSAKQIGWLVLGDEIQIDPTKFPKQSIGKFLKECGPVSSWRVSALDTPSKITLKPRLLSNEPLLKTSRVGGHESDLVVAECVEKIMKKTGWVVEINALCQSGLIRVIRRNALGEVRTSPKSGLPISLNLR

SEQ ID NO: 58 - protein, 1113 aa, Alcanivorax sp.
  source 1..1113: note = W115
MRYRVGLDLGTASVGAAVFSMDEQGNPMELIWHYERLFSEPLVPDMGQLKPKKAARRLARQQRRQIDRRASRLRRIAIVSRRLGIAPGRNDSGVHGNDVPTLRAMAVNERIELGQLRAVLLRMGKKRGYGGTFKAVRKVGEAGEVASGASRLEEEMVALASVQNKDSVTVGEYLAARVEHGLPSKLKVAANNEYYAPEYALFRQYLGLPAIKGRPDCLPNMYALRHQIEHEFERIWATQSQFHDVMKDHGVKEEIRNAIFFQRPLKSPADKVGRCSLQTNLPRAPRAQIAAQNFRIEKQMADLRWGMGRRAEMLNDHQKAVIRELLNQQKELSFRKIYKELERAGCPGPEGKGLNMDRAALGGRDDLSGNTTLAAWRKLGLEDRWQELDEVTQIQVINFLADLGSPEQLDTDDWSCRFMGKNGRPRNFSDEFVAFMNELRMTDGFDRLSKMGFEGGRSSYSIKALKALTEWMIAPHWRETPETHRVDEEAAIRECYPESLATPAQGGRQSKLEPPPLTGNEVVDVALRQVRHTINMMIDDLGSVPAQIVVEMAREMKGGVTRRNDIEKQNKRFASERKKAAQSIEENGKTPTPARILRYQLWIEQGHQCPYCESNISLEQALSGAYTNFEHILPRTLTQIGRKRSELVLAHRECNDEKGNRTPYQAFGHDDRRWRIVEQRANALPKKSSRKTRLLLLKDFEGEALTDESIDEFADRQLHESSWLAKVTTQWLSSLGSDVYVSRGSLTAELRRRWGLDTVIPQVRFESGMPVVDEEGAEITPEEFEKFRLQWEGHRVTREMRTDRRPDKRIDHRHHLVDAIVTALTSRSLYQQYAKAWKVADEKQRHGRVDVKVELPMPILTIRDIALEAVRSVRISHKPDRYPDGRFFEATAYGIAQRLDERSGEKVDWLVSRKSLTDLAPEKKSIDVDKVRANISRIVGEAIRLHISNIFEKRVSKGMTPQQALREPIEFQGNILRKVRCFYSKADDCVRIEHSSRRGHHYKMLLNDGFAYMEVPCKEGILYGVPNLVRPSEAVGIKRAPESGDFIRFYKGDTVKNIKTGRVYTIKQILGDGGGKLILTPVTETKPADLLSAKWGRLKVGGRNIHLLRLCAE

SEQ ID NO: 59 - protein, 1052 aa, Aminomonas paucivorans
  source 1..1052: note = DSM 12260
MIGEHVRGGCLFDDHWTPNWGAFRLPNTVRTFTKAENPKDGSSLAEPRRQARGLRRRLRRKTQRLEDLRRLLAKEGVLSLSDLETLFRETPAKDPYQLRAEGLDRPLSFPEWVRVLYHITKHRGFQSNRRNPVEDGQERSRQEEEGKLLSGVGENERLLREGGYRTAGEMLARDPKFQDHRRNRAGDYSHTLSRSLLLEEARRLFQSQRTLGNPHASSNLEEAFLHLVAFQNPFASGEDIRNKAGHCSLEPDQIRAPRRSASAETFMLLQKTGNLRLIHRRTGEERPLTDKEREQIHLLAWKQEKVTHKTLRRHLEIPEEWLFTGLPYHRSGDKAEEKLFVHLAGIHEIRKALDKGPDPAVWDTLRSRRDLLDSIADTLTFYKNEDEILPRLESLGLSPENARALAPLSFSGTAHLSLSALGKLLPHLEEGKSYTQARADAGYAAPPPDRHPKLPPLEEADWRNPVVFRALTQTRKVVNALVRRYGPPWCIHLETARELSQPAKVRRRIETEQQANEKKKQQAEREFLDIVGTAPGPGDLLKMRLWREQGGFCPYCEEYLNPTRLAEPGYAEMDHILPYSRSLDNGWHNRVLVHGKDNRDKGNRTPFEAFGGDTARWDRLVAWVQASHLSAPKKRNLLREDFGEEAERELKDRNLTDTRFITKTAATLLRDRLTFHPEAPKDPVMTLNGRLTAFLRKQWGLHKNRKNGDLHHALDAAVLAVASRSFVYRLSSHNAAWGELPRGREAENGFSLPYPAFRSEVLARLCPTREEILLRLDQGGVGYDEAFRNGLRPVFVSRAPSRRLRGKAHMETLRSPKWKDHPEGPRTASRIPLKDLNLEKLERMVGKDRDRKLYEALRERLAAFGGNGKKAFVAPFRKPCRSGEGPLVRSLRIFDSGYSGVELRDGGEVYAVADHESMVRVDVYAKKNRFYLVPVYVADVARGIVKNRAIVAHKSEEEWDLVDGSFDFRFSLFPGDLVEIEKKDGAYLGYYKSCHRGDGRLLLDRHDRMPRESDCGTFYVSTRKDVLSMSKYQVDPLGEIRLVGSEKPPFVL

SEQ ID NO: 60 - protein, 1233 aa, Mycoplasma canis
  source 1..1233: note = PG 14
MEKKRKVTLGFDLGIASVGWAIVDSETNQVYKLGSRLFDAPDTNLERRTQRGTRRLLRRRKYRNQKFYNLVKRTEVFGLSSREAIENRFRELSIKYPNIIELKTKALSQEVCPDEIAWILHDYLKNRGYFYDEKETKEDFDQQTVESMPSYKLNEFYKKYGYFKGALSQPTESEMKDNKDLKEAFFFDFSNKEWLKEINYFFNVQKNILSETFIEEFKKIFSFTRDISKGPGSDNMPSPYGIFGEFGDNGQGGRYEHIWDKNIGKCSIFTNEQRAPKYLPSALIFNFLNELANIRLYSTDKKNIQPLWKLSSVDKLNILLNLFNLPISEKKKKLTSTNINDIVKKESIKSIMISVEDIDMIKDEWAGKEPNVYGVGLSGLNIEESAKENKFKFQDLKILNVLINLLDNVGIKFEFKDRNDIIKNLELLDNLYLFLIYQKESNNKDSSIDLFIAKNESLNIENLKLKLKEFLLGAGNEFENHNSKTHSLSKKAIDEILPKLLDNNEGWNLEAIKNYDEEIKSQIEDNSSLMAKQDKKYLNDNFLKDAILPPNVKVTFQQAILIFNKIIQKFSKDFEIDKVVIELAREMTQDQENDALKGIAKAQKSKKSLVEERLEANNIDKSVFNDKYEKLIYKIFLWISQDFKDPYTGAQISVNEIVNNKVEIDHIIPYSLCFDDSSANKVLVHKQSNQEKSNSLPYEYIKQGHSGWNWDEFTKYVKRVFVNNVDSILSKKERLKKSENLLTASYDGYDKLGFLARNLNDTRYATILFRDQLNNYAEHHLIDNKKMFKVIAMNGAVTSFIRKNMSYDNKLRLKDRSDFSHHAYDAAIIALFSNKTKTLYNLIDPSLNGIISKRSEGYWVIEDRYTGEIKELKKEDWTSIKNNVQARKIAKEIEEYLIDLDDEVFFSRKTKRKTNRQLYNETIYGIATKTDEDGITNYYKKEKFSILDDKDIYLRLLREREKFVINQSNPEVIDQIIEIIESYGKENNIPSRDEAINIKYTKNKINYNLYLKQYMRSLTKSLDQFSEEFINQMIANKTFVLYNPTKNTTRKIKFLRLVNDVKINDIRKNQVINKFNGKNNEPKAFYENINSLGAIVFKNSANNFKTLSINTQIAIFGDKNWDIEDFKTYNMEKIEKYKEIYGIDKTYNFHSFIFPGTILLDKQNKEFYYISSIQTVRDIIEIKFLNKIEFKDENKNQDTSKTPKRLMFGIKSIMNNYEQVDISPFGINKKIFE

SEQ ID NO: 61 - protein, 1119 aa, Lactobacillus coryniformis
  source 1..1119: note = KCTC 3535
MGYRIGLDVGITSTGYAVLKTDKNGLPYKILTLDSVIYPRAENPQTGASLAEPRRIKRGLRRRTRRTKFRKQRTQQLFIHSGLLSKPEIEQILATPQAKYSVYELRVAGLDRRLTNSELFRVLYFFIGHRGFKSNRKAELNPENEADKKQMGQLLNSIEEIRKAIAEKGYRTVGELYLKDPKYNDHKRNKGYIDGYLSTPNRQMLVDEIKQILDKQRELGNEKLTDEFYATYLLGDENRAGIFQAQRDFDEGPGAGPYAGDQIKKMVGKDIFEPTEDRAAKATYTFQYFNLLQKMTSLNYQNTTGDTWHTLNGLDRQAIIDAVFAKAEKPTKTYKPTDFGELRKLLKLPDDARFNLVNYGSLQTQKEIETVEKKTRFVDFKAYHDLVKVLPEEMWQSRQLLDHIGTALTLYSSDKRRRRYFAEELNLPAELIEKLLPLNFSKFGHLSIKSMQNIIPYLEMGQVYSEATTNTGYDFRKKQISKDTIREEITNPVVRRAVTKTIKIVEQIIRRYGKPDGINIELARELGRNFKERGDIQKRQDKNRQTNDKIAAELTELGIPVNGQNIIRYKLHKEQNGVDPYTGDQIPFERAFSEGYEVDHIIPYSISWDDSYTNKVLTSAKCNREKGNRIPMVYLANNEQRLNALTNIADNIIRNSRKRQKLLKQKLSDEELKDWKQRNINDTRFITRVLYNYFRQAIEFNPELEKKQRVLPLNGEVTSKIRSRWGFLKVREDGDLHHAIDATVIAAITPKFIQQVTKYSQHQEVKNNQALWHDAEIKDAEYAAEAQRMDADLFNKIFNGFPLPWPEFLDELLARISDNPVEMMKSRSWNTYTPIEIAKLKPVFVVRLANHKISGPAHLDTIRSAKLFDEKGIVLSRVSITKLKINKKGQVATGDGIYDPENSNNGDKVVYSAIRQALEAHNGSGELAFPDGYLEYVDHGTKKLVRKVRVAKKVSLPVRLKNKAAADNGSMVRIDVFNTGKKFVFVPIYIKDTVEQVLPNKAIARGKSLWYQITESDQFCFSLYPGDMVHIESKTGIKPKYSNKENNTSVVPIKNFYGYFDGADIATASILVRAHDSSYTARSIGIAGLLKFEKYQVDYFGRYHKVHEKKRQLFVKRDE

SEQ ID NO: 62 - protein, 1195 aa, Elusimicrobium minutum
  source 1..1195: note = Pei191
MQKNINTKQNHIYIKQAQKIKEKLGDKPYRIGLDLGVGSIGFAIVSMEENDGNVLLPKEIIMVGSRIFKASAGAADRKLSRGQRNNHRHTRERMRYLWKVLAEQKLALPVPADLDRKENSSEGETSAKRFLGDVLQKDIYELRVKSLDERLSLQELGYVLYHIAGHRGSSAIRTFENDSEEAQKENTENKKIAGNIKRLMAKKNYRTYGEYLYKEFFENKEKHKREKISNAANNHKFSPTRDLVIKEAEAILKKQAGKDGFHKELTEEYIEKLTKAIGYESEKLIPESGFCPYLKDEKRLPASHKLNEERRLWETLNNARYSDPIVDIVTGEITGYYEKQFTKEQKQKLFDYLLTGSELTPAQTKKLLGLKNTNFEDIILQGRDKKAQKIKGYKLIKLESMPFWARLSEAQQDSFLYDWNSCPDEKLLTEKLSNEYHLTEEEIDNAFNEIVLSSSYAPLGKSAMLIILEKIKNDLSYTEAVEEALKEGKLTKEKQAIKDRLPYYGAVLQESTQKIIAKGFSPQFKDKGYKTPHTNKYELEYGRIANPVVHQTLNELRKLVNEIIDILGKKPCEIGLETARELKKSAEDRSKLSREQNDNESNRNRIYEIYIRPQQQVIITRRENPRNYILKFELLEEQKSQCPFCGGQISPNDIINNQADIEHLFPIAESEDNGRNNLVISHSACNADKAKRSPWAAFASAAKDSKYDYNRILSNVKENIPHKAWRFNQGAFEKFIENKPMAARFKTDNSYISKVAHKYLACLFEKPNIICVKGSLTAQLRMAWGLQGLMIPFAKQLITEKESESFNKDVNSNKKIRLDNRHHALDAIVIAYASRGYGNLLNKMAGKDYKINYSERNWLSKILLPPNNIVWENIDADLESFESSVKTALKNAFISVKHDHSDNGELVKGTMYKIFYSERGYTLTTYKKLSALKLTDPQKKKTPKDFLETALLKFKGRESEMKNEKIKSAIENNKRLFDVIQDNLEKAKKLLEEENEKSKAEGKKEKNINDASIYQKAISLSGDKYVQLSKKEPGKFFAISKPTPTTTGYGYDTGDSLCVDLYYDNKGKLCGEIIRKIDAQQKNPLKYKEQGFTLFERIYGGDILEVDFDIHSDKNSFRNNTGSAPENRVFIKVGTFTEITNNNIQIWFGNIIKSTGGQDDSFTINSMQQYNPRKLILSSCGFIKYRSPILKNKEG

SEQ ID NO: 63 - protein, 1082 aa, Neisseria meningitidis
  source 1..1082: note = Z2491
MAAFKPNPINYILGLDIGIASVGWAMVEIDEDENPICLIDLGVRVFERAEVPKTGDSLAMARRLARSVRRLTRRRAHRLLRARRLLKREGVLQAADFDENGLIKSLPNTPWQLRAAALDRKLTPLEWSAVLLHLIKHRGYLSQRKNEGETADKELGALLKGVADNAHALQTGDFRTPAELALNKFEKESGHIRNQRGDYSHTFSRKDLQAELILLFEKQKEFGNPHVSGGLKEGIETLLMTQRPALSGDAVQKMLGHCTFEPAEPKAAKNTYTAERFIWLTKLNNLRILEQGSERPLTDTERATLMDEPYRKSKLTYAQARKLLGLEDTAFFKGLRYGKDNAEASTLMEMKAYHAISRALEKEGLKDKKSPLNLSPELQDEIGTAFSLFKTDEDITGRLKDRIQPEILEALLKHISFDKFVQISLKALRRIVPLMEQGKRYDEACAEIYGDHYGKKNTEEKIYLPPIPADEIRNPVVLRALSQARKVINGVVRRYGSPARIHIETAREVGKSFKDRKEIEKRQEENRKDREKAAAKFREYFPNFVGEPKSKDILKLRLYEQQHGKCLYSGKEINLGRLNEKGYVEIDHALPFSRTWDDSFNNKVLVLGSENQNKGNQTPYEYFNGKDNSREWQEFKARVETSRFPRSKKQRILLQKFDEDGFKERNLNDTRYVNRFLCQFVADRMRLTGKGKKRVFASNGQITNLLRGFWGLRKVRAENDRHHALDAVVVACSTVAMQQKITRFVRYKEMNAFDGKTIDKETGEVLHQKTHFPQPWEFFAQEVMIRVFGKPDGKPEFEEADTPEKLRTLLAEKLSSRPEAVHEYVTPLFVSRAPNRKMSGQGHMETVKSAKRLDEGVSVLRVPLTQLKLKDLEKMVNREREPKLYEALKARLEAHKDDPAKAFAEPFYKYDKAGNRTQQVKAVRVEQVQKTGVWVRNHNGIADNATMVRVDVFEKGDKYYLVPIYSWQVAKGILPDRAVVQGKDEEDWQLIDDSFNFKFSLHPNDLVEVITKKARMFGYFASCHRGTGNINIRIHDLDHKIGKNGILEGIGVKTALSFQKYQIDELGKEIRPCRLKKRPPVR

SEQ ID NO: 64 - protein, 1056 aa, Pasteurella multocida
  source 1..1056: note = str. Pm70
MQTTNLSYILGLDLGIASVGWAVVEINENEDPIGLIDVGVRIFERAEVPKTGESLALSRRLARSTRRLIRRRAHRLLLAKRFLKREGILSTIDLEKGLPNQAWELRVAGLERRLSAIEWGAVLLHLIKHRGYLSKRKNESQTNNKELGALLSGVAQNHQLLQSDDYRTPAELALKKFAKEEGHIRNQRGAYTHTFNRLDLLAELNLLFAQQHQFGNPHCKEHIQQYMTELLMWQKPALSGEAILKMLGKCTHEKNEFKAAKHTYSAERFVWLTKLNNLRILEDGAERALNEEERQLLINHPYEKSKLTYAQVRKLLGLSEQAIFKHLRYSKENAESATFMELKAWHAIRKALENQGLKDTWQDLAKKPDLLDEIGTAFSLYKTDEDIQQYLTNKVPNSVINALLVSLNFDKFIELSLKSLRKILPLMEQGKRYDQACREIYGHHYGEANQKTSQLLPAIPAQEIRNPVVLRTLSQARKVINAIIRQYGSPARVHIETGRELGKSFKERREIQKQQEDNRTKRESAVQKFKELFSDFSSEPKSKDILKFRLYEQQHGKCLYSGKEINIHRLNEKGYVEIDHALPFSRTWDDSFNNKVLVLASENQNKGNQTPYEWLQGKINSERWKNFVALVLGSQCSAAKKQRLLTQVIDDNKFIDRNLNDTRYIARFLSNYIQENLLLVGKNKKNVFTPNGQITALLRSRWGLIKARENNNRHHALDAIVVACATPSMQQKITRFIRFKEVHPYKIENRYEMVDQESGEIISPHFPEPWAYFRQEVNIRVFDNHPDTVLKEMLPDRPQANHQFVQPLFVSRAPTRKMSGQGHMETIKSAKRLAEGISVLRIPLTQLKPNLLENMVNKEREPALYAGLKARLAEFNQDPAKAFATPFYKQGGQQVKAIRVEQVQKSGVLVRENNGVADNASIVRTDVFIKNNKFFLVPIYTWQVAKGILPNKAIVAHKNEDEWEEMDEGAKFKFSLFPNDLVELKTKKEYFFGYYIGLDRATGNISLKEHDGEISKGKDGVYRVGVKLALSFEKYQVDELGKNRQICRPQQRQPVR

SEQ ID NO: 65 - protein, 1059 aa, Rhodovulum sp.
  source 1..1059: note = PH10
MGIRFAFDLGTNSIGWAVWRTGPGVFGEDTAASLDGSGVLIFKDGRNPKDGQSLATMRRVPRQSRKRRDRFVLRRRDLLAALRKAGLFPVDVEEGRRLAATDPYHLRAKALDESLTPHEMGRVIFHLNQRRGFRSNRKADRQDREKGKIAEGSKRLAETLAATNCRTLGEFLWSRHRGTPRTRSPTRIRMEGEGAKALYAFYPTREMVRAEFERLWTAQSRFAPDLLTPERHEEIAGILFRQRDLAPPKIGCCTFEPSERRLPRALPSVEARGIYERLAHLRITTGPVSDRGLTRPERDVLASALLAGKSLTFKAVRKTLKILPHALVNFEEAGEKGLDGALTAKLLSKPDHYGAAWHGLSFAEKDTFVGKLLDEADEERLIRRLVTENRLSEDAARRCASIPLADGYGRLGRTANTEILAALVEETDETGTVVTYAEAVRRAGERTGRNWHHSDERDGVILDRLPYYGEILQRHVVPGSGEPEEKNEAARWGRLANPTVHIGLNQLRKVVNRLIAAHGRPDQIVVELARELKLNREQKERLDRENRKNREENERRTAILAEHGQRDTAENKIRLRLFEEQARANAGIALCPYTGRAIGIAELFTSEVEIDHILPVSLTLDDSLANRVLCRREANREKRRQTPFQAFGATPAWNDIVARAAKLPPNKRWRFDPAALERFEREGGFLGRQLNETKYLSRLAKIYLGKICDPDRVYVTPGTLTGLLRARWGLNSILSDSNFKNRSDHRHHAVDAVVIGVLTRGMIQRIAHDAARAEDQDLDRVFRDVPVPFEDFRDHVRERVSTITVAVKPEHGKGGALHEDTSYGLVPDTDPNAALGNLVVRKPIRSLTAGEVDRVRDRALRARLGALAAPFRDESGRVRDAKGLAQALEAFGAENGIRRVRILKPDASVVTIADRRTGVPYRAVAPGENHHVDIVQMRDGSWRGFAASVFEVNRPGWRPEWEVKKLGGKLVMRLHKGDMVELSDKDGQRRVKVVQQIEISANRVRLSPHNDGGKLQDRHADADDPFRWDLATIPLLKDRGCVAVRVDPIGVVTLRRSNV

SEQ ID NO: 66 - protein, 1096 aa, Eubacterium dolichum
  source 1..1096: note = DSM 3991
MMEVFMGRLVLGLDIGITSVGFGIIDLDESEIVDYGVRLFKEGTAAENETRRTKRGGRRLKRRRVTRREDMLHLLKQAGIISTSFHPLNNPYDVRVKGLNERLNGEELATALLHLCKHRGSSVETIEDDEAKAKEAGETKKVLSMNDQLLKSGKYVCEIQKERLRTNGHIRGHENNFKTRAYVDEAFQILSHQDLSNELKSAIITIISRKRMYYDGPGGPLSPTPYGRYTYFGQKEPIDLIEKMRGKCSLFPNEPRAPKLAYSAELFNLLNDLNNLSIEGEKLTSEQKAMILKIVHEKGKITPKQLAKEVGVSLEQIRGFRIDTKGSPLLSELTGYKMIREVLEKSNDEHLEDHVFYDEIAEILTKTKDIEGRKKQISELSSDLNEESVHQLAGLTKFTAYHSLSFKALRLINEEMLKTELNQMQSITLFGLKQNNELSVKGMKNIQADDTAILSPVAKRAQRETFKVVNRLREIYGEFDSIVVEMAREKNSEEQRKAIRERQKFFEMRNKQVADIIGDDRKINAKLREKLVLYQEQDGKTAYSLEPIDLKLLIDDPNAYEVDHIIPISISLDDSITNKVLVTHRENQEKGNLTPISAFVKGRFTKGSLAQYKAYCLKLKEKNIKTNKGYRKKVEQYLLNENDIYKYDIQKEFINRNLVDTSYASRVVLNTLTTYFKQNEIPTKVFTVKGSLTNAFRRKINLKKDRDEDYGHHAIDALIIASMPKMRLLSTIFSRYKIEDIYDESTGEVFSSGDDSMYYDDRYFAFIASLKAIKVRKFSHKIDTKPNRSVADETIYSTRVIDGKEKVVKKYKDIYDPKFTALAEDILNNAYQEKYLMALHDPQTFDQIVKVVNYYFEEMSKSEKYFTKDKKGRIKISGMNPLSLYRDEHGMLKKYSKKGDGPAITQMKYFDGVLGNHIDISAHYQVRDKKVVLQQISPYRTDFYYSKENGYKFVTIRYKDVRWSEKKKKYVIDQQDYAMKKAEKKIDDTYEFQFSMHRDELIGITKAEGEALIYPDETWHNFNFFFHAGETPEILKFTATNNDKSNKIEVKPIHCYCKMRLMPTISKKIVRIDKYATDVVGNLYKVKKNTLKFEFD

SEQ ID NO: 67 - protein, 1132 aa, Nitratifractor salsuginis
  source 1..1132: note = DSM 16511
MKKILGVDLGITSFGYAILQETGKDLYRCLDNSVVMRNNPYDEKSGESSQSIRSTQKSMRRLIEKRKKRIRCVAQTMERYGILDYSETMKINDPKNNPIKNRWQLRAVDAWKRPLSPQELFAIFAHMAKHRGYKSIATEDLIYELELELGLNDPEKESEKKADERRQVYNALRHLEELRKKYGGETIAQTIHRAVEAGDLRSYRNHDDYEKMIRREDIEEEIEKVLLRQAELGALGLPEEQVSELIDELKACITDQEMPTIDESLFGKCTFYKDELAAPAYSYLYDLYRLYKKLADLNIDGYEVTQEDREKVIEWVEKKIAQGKNLKKITHKDLRKILGLAPEQKIFGVEDERIVKGKKEPRTFVPFFFLADIAKFKELFASIQKHPDALQIFRELAEILQRSKTPQEALDRLRALMAGKGIDTDDRELLELFKNKRSGTRELSHRYILEALPLFLEGYDEKEVQRILGFDDREDYSRYPKSLRHLHLREGNLFEKEENPINNHAVKSLASWALGLIADLSWRYGPFDEIILETTRDALPEKIRKEIDKAMREREKALDKIIGKYKKEFPSIDKRLARKIQLWERQKGLDLYSGKVINLSQLLDGSADIEHIVPQSLGGLSTDYNTIVTLKSVNAAKGNRLPGDWLAGNPDYRERIGMLSEKGLIDWKKRKNLLAQSLDEIYTENTHSKGIRATSYLEALVAQVLKRYYPFPDPELRKNGIGVRMIPGKVTSKTRSLLGIKSKSRETNFHHAEDALILSTLTRGWQNRLHRMLRDNYGKSEAELKELWKKYMPHIEGLTLADYIDEAFRRFMSKGEESLFYRDMFDTIRSISYWVDKKPLSASSHKETVYSSRHEVPTLRKNILEAFDSLNVIKDRHKLTTEEFMKRYDKEIRQKLWLHRIGNTNDESYRAVEERATQIAQILTRYQLMDAQNDKEIDEKFQQALKELITSPIEVTGKLLRKMRFVYDKLNAMQIDRGLVETDKNMLGIHISKGPNEKLIFRRMDVNNAHELQKERSGILCYLNEMLFIFNKKGLIHYGCLRSYLEKGQGSKYIALFNPRFPANPKAQPSKFTSDSKIKQVGIGSATGIIKAHLDLDGHVRSYEVFGTLPEGSIEWFKEESGYGRVEDDPHH

SEQ ID NO: 68 - protein, 1173 aa, Rhodospirillum rubrum
  source 1..1173: note = ATCC 11170
MRPIEPWILGLDIGTDSLGWAVFSCEEKGPPTAKELLGGGVRLFDSGRDAKDHTSRQAERGAFRRARRQTRTWPWRRDRLIALFQAAGLTPPAAETRQIALALRREAVSRPLAPDALWAALLHLAHHRGFRSNRIDKRERAAAKALAKAKPAKATAKATAPAKEADDEAGFWEGAEAALRQRMAASGAPTVGALLADDLDRGQPVRMRYNQSDRDGVVAPTRALIAEELAEIVARQSSAYPGLDWPAVTRLVLDQRPLRSKGAGPCAFLPGEDRALRALPTVQDFIIRQTLANLRLPSTSADEPRPLTDEEHAKALALLSTARFVEWPALRRALGLKRGVKFTAETERNGAKQAARGTAGNLTEAILAPLIPGWSGWDLDRKDRVFSDLWAARQDRSALLALIGDPRGPTRVTEDETAEAVADAIQIVLPTGRASLSAKAARAIAQAMAPGIGYDEAVTLALGLHHSHRPRQERLARLPYYAAALPDVGLDGDPVGPPPAEDDGAAAEAYYGRIGNISVHIALNETRKIVNALLHRHGPILRLVMVETTRELKAGADERKRMIAEQAERERENAEIDVELRKSDRWMANARERRQRVRLARRQNNLCPYTSTPIGHADLLGDAYDIDHVIPLARGGRDSLDNMVLCQSDANKTKGDKTPWEAFHDKPGWIAQRDDFLARLDPQTAKALAWRFADDAGERVARKSAEDEDQGFLPRQLTDTGYIARVALRYLSLVTNEPNAVVATNGRLTGLLRLAWDITPGPAPRDLLPTPRDALRDDTAARRFLDGLTPPPLAKAVEGAVQARLAALGRSRVADAGLADALGLTLASLGGGGKNRADHRHHFIDAAMIAVTTRGLINQINQASGAGRILDLRKWPRTNFEPPYPTFRAEVMKQWDHIHPSIRPAHRDGGSLHAATVFGVRNRPDARVLVQRKPVEKLFLDANAKPLPADKIAEIIDGFASPRMAKRFKALLARYQAAHPEVPPALAALAVARDPAFGPRGMTANTVIAGRSDGDGEDAGLITPFRANPKAAVRTMGNAVYEVWEIQVKGRPRWTHRVLTRFDRTQPAPPPPPENARLVMRLRRGDLVYWPLESGDRLFLVKKMAVDGRLALWPARLATGKATALYAQLSCPNINLNGDQGYCVQSAEGIRKEKIRTTSCTALGRLRLSKKAT

SEQ ID NO: 69 - protein, 1021 aa, Clostridium cellulolyticum
  source 1..1021: note = H10
MKYTLGLDVGIASVGWAVIDKDNNKIIDLGVRCFDKAEESKTGESLATARRIARGMRRRISRRSQRLRLVKKLFVQYEIIKDSSEFNRIFDTSRDGWKDPWELRYNALSRILKPYELVQVLTHITKRRGFKSNRKEDLSTTKEGVVITSIKNNSEMLRTKNYRTIGEMIFMETPENSNKRNKVDEYIHTIAREDLLNEIKYIFSIQRKLGSPFVTEKLEHDFLNIWEFQRPFASGDSILSKVGKCTLLKEELRAPTSCYTSEYFGLLQSINNLVLVEDNNTLTLNNDQRAKIIEYAHFKNEIKYSEIRKLLDIEPEILFKAHNLTHKNPSGNNESKKFYEMKSYHKLKSTLPTDIWGKLHSNKESLDNLFYCLTVYKNDNEIKDYLQANNLDYLIEYIAKLPTFNKFKHLSLVAMKRIIPFMEKGYKYSDACNMAELDFTGSSKLEKCNKLTVEPIIENVTNPVVIRALTQARKVINAIIQKYGLPYMVNIELAREAGMTRQDRDNLKKEHENNRKAREKISDLIRQNGRVASGLDILKWRLWEDQGGRCAYSGKPIPVCDLLNDSLTQIDHIYPYSRSMDDSYMNKVLVLTDENQNKRSYTPYEVWGSTEKWEDFEARIYSMHLPQSKEKRLLNRNFITKDLDSFISRNLNDTRYISRFLKNYIESYLQFSNDSPKSCVVCVNGQCTAQLRSRWGLNKNREESDLHHALDAAVIACADRKIIKEITNYYNERENHNYKVKYPLPWHSFRQDLMETLAGVFISRAPRRKITGPAHDETIRSPKHFNKGLTSVKIPLTTVTLEKLETMVKNTKGGISDKAVYNVLKNRLIEHNNKPLKAFAEKIYKPLKNGTNGAIIRSIRVETPSYTGVFRNEGKGISDNSLMVRVDVFKKKDKYYLVPIYVAHMIKKELPSKAIVPLKPESQWELIDSTHEFLFSLYQNDYLVIKTKKGITEGYYRSCHRGTGSLSLMPHFANNKNVKIDIGVRTAISIEKYNVDILGNKSIVKGEPRRGMEKYNSFKSN

SEQ ID NO: 70 - protein, 1024 aa, Helicobacter mustelae
  source 1..1024: note = 12198
MIRTLGIDIGIASIGWAVIEGEYTDKGLENKEIVASGVRVFTKAENPKNKESLALPRTLARSARRRNARKKGRIQQVKHYLSKALGLDLECFVQGEKLATLFQTSKDFLSPWELRERALYRVLDKEELARVILHIAKRRGYDDITYGVEDNDSGKIKKAIAENSKRIKEEQCKTIGEMMYKLYFQKSLNVRNKKESYNRCVGRSELREELKTIFQIQQELKSPWVNEELIYKLLGNPDAQSKQEREGLIFYQRPLKGFGDKIGKCSHIKKGENSPYRACKHAPSAEEFVALTKSINFLKNLTNRHGLCFSQEDMCVYLGKILQEAQKNEKGLTYSKLKLLLDLPSDFEFLGLDYSGKNPEKAVFLSLPSTFKLNKITQDRKTQDKIANILGANKDWEAILKELESLQLSKEQIQTIKDAKLNFSKHINLSLEALYHLLPLMREGKRYDEGVEILQERGIFSKPQPKNRQLLPPLSELAKEESYFDIPNPVLRRALSEFRKVVNALLEKYGGFHYFHIELTRDVCKAKSARMQLEKINKKNKSENDAASQLLEVLGLPNTYNNRLKCKLWKQQEEYCLYSGEKITIDHLKDQRALQIDHAFPLSRSLDDSQSNKVLCLTSSNQEKSNKTPYEWLGSDEKKWDMYVGRVYSSNFSPSKKRKLTQKNFKERNEEDFLARNLVDTGYIGRVTKEYIKHSLSFLPLPDGKKEHIRIISGSMTSTMRSFWGVQEKNRDHHLHHAQDAIIIACIEPSMIQKYTTYLKDKETHRLKSHQKAQILREGDHKLSLRWPMSNFKDKIQESIQNIIPSHHVSHKVTGELHQETVRTKEFYYQAFGGEEGVKKALKFGKIREINQGIVDNGAMVRVDIFKSKDKGKFYAVPIYTYDFAIGKLPNKAIVQGKKNGIIKDWLEMDENYEFCFSLFKNDCIKIQTKEMQEAVLAIYKSTNSAKATIELEHLSKYALKNEDEEKMFTDTDKEKNKTMTRESCGIQGLKVFQKVKLSVLGEVLEHKPRNRQNIALKTTPKHV

SEQ ID NO: 71 - protein, 1092 aa, Ilyobacter polytropus
  source 1..1092: note = DSM 2926
MKYSIGLDIGIASVGWSVINKDKERIEDMGVRIFQKAENPKDGSSLASSRREKRGSRRRNRRKKHRLDRIKNILCESGLVKKNEIEKIYKNAYLKSPWELRAKSLEAKISNKEIAQILLHIAKRRGFKSFRKTDRNADDTGKLLSGIQENKKIMEEKGYLTIGDMVAKDPKFNTHVRNKAGSYLFSFSRKLLEDEVRKIQAKQKELGNTHFTDDVLEKYIEVFNSQRNFDEGPSKPSPYYSEIGQIAKMIGNCTFESSEKRTAKNTWSGERFVFLQKLNNFRIVGLSGKRPLTEEERDIVEKEVYLKKEVRYEKLRKILYLKEEERFGDLNYSKDEKQDKKTEKTKFISLIGNYTIKKLNLSEKLKSEIEEDKSKLDKIIEILTFNKSDKTIESNLKKLELSREDIEILLSEEFSGTLNLSLKAIKKILPYLEKGLSYNEACEKADYDYKNNGIKFKRGELLPVVDKDLIANPVVLRAISQTRKVVNAIIRKYGTPHTIHVEVARDLAKSYDDRQTIIKENKKRELENEKTKKFISEEFGIKNVKGKLLLKYRLYQEQEGRCAYSRKELSLSEVILDESMTDIDHIIPYSRSMDDSYSNKVLVLSGENRKKSNLLPKEYFDRQGRDWDTFVLNVKAMKIHPRKKSNLLKEKFTREDNKDWKSRALNDTRYISRFVANYLENALEYRDDSPKKRVFMIPGQLTAQLRARWRLNKVRENGDLHHALDAAVVAVTDQKAINNISNISRYKELKNCKDVIPSIEYHADEETGEVYFEEVKDTRFPMPWSGFDLELQKRLESENPREEFYNLLSDKRYLGWFNYEEGFIEKLRPVFVSRMPNRGVKGQAHQETIRSSKKISNQIAVSKKPLNSIKLKDLEKMQGRDTDRKLYEALKNRLEEYDDKPEKAFAEPFYKPTNSGKRGPLVRGIKVEEKQNVGVYVNGGQASNGSMVRIDVFRKNGKFYTVPIYVHQTLLKELPNRAINGKPYKDWDLIDGSFEFLYSFYPNDLIEIEFGKSKSIKNDNKLTKTEIPEVNLSEVLGYYRGMDTSTGAATIDTQDGKIQMRIGIKTVKNIKKYQVDVLGNVYKVKREKRQTF

SEQ ID NO: 72 - protein, 1179 aa, Sphaerochaeta sp.
  source 1..1179: note = Sphaerochaeta globus str. Buddy
MSKKVSRRYEEQAQEICQRLGSRPYSIGLDLGVGSIGVAVAAYDPIKKQPSDLVFVSSRIFIPSTGAAERRQKRGQRNSLRHRANRLKFLWKLLAERNLMLSYSEQDVPDPARLRFEDAVVRANPYELRLKGLNEQLTLSELGYALYHIANHRGSSSVRTFLDEEKSSDDKKLEEQQAMTEQLAKEKGISTFIEVLTAFNTNGLIGYRNSESVKSKGVPVPTRDIISNEIDVLLQTQKQFYQEILSDEYCDRIVSAILFENEKIVPEAGCCPYFPDEKKLPRCHFLNEERRLWEAINNARIKMPMQEGAAKRYQSASFSDEQRHILFHIARSGTDITPKLVQKEFPALKTSIIVLQGKEKAIQKIAGFRFRRLEEKSFWKRLSEEQKDDFFSAWTNTPDDKRLSKYLMKHLLLTENEVVDALKTVSLIGDYGPIGKTATQLLMKHLEDGLTYTEALERGMETGEFQELSVWEQQSLLPYYGQILTGSTQALMGKYWHSAFKEKRDSEGFFKPNTNSDEEKYGRIANPVVHQTLNELRKLMNELITILGAKPQEITVELARELKVGAEKREDIIKQQTKQEKEAVLAYSKYCEPNNLDKRYIERFRLLEDQAFVCPYCLEHISVADIAAGRADVDHIFPRDDTADNSYGNKVVAHRQCNDIKGKRTPYAAFSNTSAWGPIMHYLDETPGMWRKRRKFETNEEEYAKYLQSKGFVSRFESDNSYIAKAAKEYLRCLFNPNNVTAVGSLKGMETSILRKAWNLQGIDDLLGSRHWSKDADTSPTMRKNRDDNRHHGLDAIVALYCSRSLVQMINTMSEQGKRAVEIEAMIPIPGYASEPNLSFEAQRELFRKKILEFMDLHAFVSMKTDNDANGALLKDTVYSILGADTQGEDLVFVVKKKIKDIGVKIGDYEEVASAIRGRITDKQPKWYPMEMKDKIEQLQSKNEAALQKYKESLVQAAAVLEESNRKLIESGKKPIQLSEKTISKKALELVGGYYYLISNNKRTKTFVVKEPSNEVKGFAFDTGSNLCLDFYHDAQGKLCGEIIRKIQAMNPSYKPAYMKQGYSLYVRLYQGDVCELRASDLTEAESNLAKTTHVRLPNAKPGRTFVIIITFTEMGSGYQIYFSNLAKSKKGQDTSFTLTTIKNYDVRKVQLSSAGLVRYVSPLLVDKIEKDEVALCGE

SEQ ID NO: 73 - protein, 1054 aa, Staphylococcus lugdunensis
  source 1..1054: note = M23590
MNQKFILGLDIGITSVGYGLIDYETKNIIDAGVRLFPEANVENNEGRRSKRGSRRLKRRRIHRLERVKKLLEDYNLLDQSQIPQSTNPYAIRVKGLSEALSKDELVIALLHIAKRRGIHKIDVIDSNDDVGNELSTKEQLNKNSKLLKDKFVCQIQLERMNEGQVRGEKNRFKTADIIKEIIQLLNVQKNFHQLDENFINKYIELVEMRREYFEGPGKGSPYGWEGDPKAWYETLMGHCTYFPDELRSVKYAYSADLFNALNDLNNLVIQRDGLSKLEYHEKYHIIENVFKQKKKPTLKQIANEINVNPEDIKGYRITKSGKPQFTEFKLYHDLKSVLFDQSILENEDVLDQIAEILTIYQDKDSIKSKLTELDILLNEEDKENIAQLTGYTGTHRLSLKCIRLVLEEQWYSSRNQMEIFTHLNIKPKKINLTAANKIPKAMIDEFILSPVVKRTFGQAINLINKIIEKYGVPEDIIIELARENNSKDKQKFINEMQKKNENTRKRINEIIGKYGNQNAKRLVEKIRLHDEQEGKCLYSLESIPLEDLLNNPNHYEVDHIIPRSVSFDNSYHNKVLVKQSENSKKSNLTPYQYFNSGKSKLSYNQFKQHILNLSKSQDRISKKKKEYLLEERDINKFEVQKEFINRNLVDTRYATRELTNYLKAYFSANNMNVKVKTINGSFTDYLRKVWKFKKERNHGYKHHAEDALIIANADFLFKENKKLKAVNSVLEKPEIESKQLDIQVDSEDNYSEMFIIPKQVQDIKDFRNFKYSHRVDKKPNRQLINDTLYSTRKKDNSTYIVQTIKDIYAKDNTTLKKQFDKSPEKFLMYQHDPRTFEKLEVIMKQYANEKNPLAKYHEETGEYLTKYSKKNNGPIVKSLKYIGNKLGSHLDVTHQFKSSTKKLVKLSIKPYRFDVYLTDKGYKFITISYLDVLKKDNYYYIPEQKYDKLKLGKAIDKNAKFIASFYKNDLIKLDGEIYKIIGVNSDTRNMIELDLPDIRYKEYCELNNIKGEPRIKKTIGKKVNSIEKLTTDVLGNVFTNTQYTKPQLLFKRGN

SEQ ID NO: 74 - protein, 1061 aa, Treponema sp.
  source 1..1061: note = JC4
MIMKLEKWRLGLDLGTNSIGWSVFSLDKDNSVQDLIDMGVRIFSDGRDPKTKEPLAVARRTARSQRKLIYRRKLRRKQVFKFLQEQGLFPKTKEECMTLKSLNPYELRIKALDEKLEPYELGRALFNLAVRRGFKSNRKDGSREEVSEKKSPDEIKTQADMQTHLEKAIKENGCRTITEFLYKNQGENGGIRFAPGRMTYYPTRKMYEEEFNLIRSKQEKYYPQVDWDDIYKAIFYQRPLKPQQRGYCIYENDKERTFKAMPCSQKLRILQDIGNLAYYEGGSKKRVELNDNQDKVLYELLNSKDKVTFDQMRKALCLADSNSFNLEENRDFLIGNPTAVKMRSKNRFGKLWDEIPLEEQDLIIETIITADEDDAVYEVIKKYDLTQEQRDFIVKNTILQSGTSMLCKEVSEKLVKRLEEIADLKYHEAVESLGYKFADQTVEKYDLLPYYGKVLPGSTMEIDLSAPETNPEKHYGKISNPTVHVALNQTRVVVNALIKEYGKPSQIAIELSRDLKNNVEKKAEIARKQNQRAKENIAINDTISALYHTAFPGKSFYPNRNDRMKYRLWSELGLGNKCIYCGKGISGAELFTKEIEIEHILPFSRTLLDAESNLTVAHSSCNAFKAERSPFEAFGTNPSGYSWQEIIQRANQLKNTSKKNKFSPNAMDSFEKDSSFIARQLSDNQYIAKAALRYLKCLVENPSDVWTTNGSMTKLLRDKWEMDSILCRKFTEKEVALLGLKPEQIGNYKKNRFDHRHHAIDAVVIGLTDRSMVQKLATKNSHKGNRIEIPEFPILRSDLIEKVKNIVVSFKPDHGAEGKLSKETLLGKIKLHGKETFVCRENIVSLSEKNLDDIVDEIKSKVKDYVAKHKGQKIEAVLSDFSKENGIKKVRCVNRVQTPIEITSGKISRYLSPEDYFAAVIWEIPGEKKTFKAQYIRRNEVEKNSKGLNVVKPAVLENGKPHPAAKQVCLLHKDDYLEFSDKGKMYFCRIAGYAATNNKLDIRPVYAVSYCADWINSTNETMLTGYWKPTPTQNWVSVNVLFDKQKARLVTVSPIGRVFRK

SEQ ID NO: 75 - protein, 1011 aa, unidentified
  source 1..1011: note = Uncultured delta proteobacterium HF0070 07E19
MSSKAIDSLEQLDLFKPQEYTLGLDLGIKSIGWAILSGERIANAGVYLFETAEELNSTGNKLISKAAERGRKRRIRRMLDRKARRGRHIRYLLEREGLPTDELEEVVVHQSNRTLWDVRAEAVERKLTKQELAAVLFHLVRHRGYFPNTKKLPPDDESDSADEEQGKINRATSRLREELKASDCKTIGQFLAQNRDRQRNREGDYSNLMARKLVFEEALQILAFQRKQGHELSKDFEKTYLDVLMGQRSGRSPKLGNCSLIPSELRAPSSAPSTEWFKFLQNLGNLQISNAYREEWSIDAPRRAQIIDACSQRSTSSYWQIRRDFQIPDEYRFNLVNYERRDPDVDLQEYLQQQERKTLANFRNWKQLEKIIGTGHPIQTLDEAARLITLIKDDEKLSDQLADLLPEASDKAITQLCELDFTTAAKISLEAMYRILPHMNQGMGFFDACQQESLPEIGVPPAGDRVPPFDEMYNPVVNRVLSQSRKLINAVIDEYGMPAKIRVELARDLGKGRELRERIKLDQLDKSKQNDQRAEDFRAEFQQAPRGDQSLRYRLWKEQNCTCPYSGRMIPVNSVLSEDTQIDHILPISQSFDNSLSNKVLCFTEENAQKSNRTPFEYLDAADFQRLEAISGNWPEAKRNKLLHKSFGKVAEEWKSRALNDTRYLTSALADHLRHHLPDSKIQTVNGRITGYLRKQWGLEKDRDKHTHHAVDAIVVACTTPAIVQQVTLYHQDIRRYKKLGEKRPTPWPETFRQDVLDVEEEIFITRQPKKVSGGIQTKDTLRKHRSKPDRQRVALTKVKLADLERLVEKDASNRNLYEHLKQCLEESGDQPTKAFKAPFYMPSGPEAKQRPILSKVTLLREKPEPPKQLTELSGGRRYDSMAQGRLDIYRYKPGGKRKDEYRVVLQRMIDLMRGEENVHVFQKGVPYDQGPEIEQNYTFLFSLYFDDLVEFQRSADSEVIRGYYRTFNIANGQLKISTYLEGRQDFDFFGANRLAHFAKVQVNLLGKVIK

SEQ ID NO: 76 - protein, 1029 aa, Alicycliphilus denitrificans
  source 1..1029: note = K601
MRSLRYRLALDLGSTSLGWALFRLDACNRPTAVIKAGVRIFSDGRNPKDGSSLAVTRRAARAMRRRRDRLLKRKTRMQAKLVEHGFFPADAGKRKALEQLNPYALRAKGLQEALLPGEFARALFHINQRRGFKSNRKTDKKDNDSGVLKKAIGQLRQQMAEQGSRTVGEYLWTRLQQGQGVRARYREKPYTTEEGKKRIDKSYDLYIDRAMIEQEFDALWAAQAAFNPTLFHEAARADLKDTLLHQRPLRPVKPGRCTLLPEEERAPLALPSTQRFRIHQEVNHLRLLDENLREVALTLAQRDAVVTALETKAKLSFEQIRKLLKLSGSVQFNLEDAKRTELKGNATSAALARKELFGAAWSGFDEALQDEIVWQLVTEEGEGALIAWLQTHTGVDEARAQAIVDVSLPEGYGNLSRKALARIVPALRAAVITYDKAVQAAGFDHHSQLGFEYDASEVEDLVHPETGEIRSVFKQLPYYGKALQRHVAFGSGKPEDPDEKRYGKIANPTVHIGLNQVRMVVNALIRRYGRPTEVVIELARDLKQSREQKVEAQRRQADNQRRNARIRRSIAEVLGIGEERVRGSDIQKWICWEELSFDAADRRCPYSGVQISAAMLLSDEVEVEHILPFSKTLDDSLNNRTVAMRQANRIKRNRTPWDARAEFEAQGWSYEDILQRAERMPLRKRYRFAPDGYERWLGDDKDFLARALNDTRYLSRVAAEYLRLVCPGTRVIPGQLTALLRGKFGLNDVLGLDGEKNRNDHRHHAVDACVIGVTDQGLMQRFATASAQARGDGLTRLVDGMPMPWPTYRDHVERAVRHIWVSHRPDHGFEGAMMEETSYGIRKDGSIKQRRKADGSAGREISNLIRIHEATQPLRHGVSADGQPLAYKGYVGGSNYCIEITVNDKGKWEGEVISTFRAYGVVRAGGMGRLRNPHEGQNGRKLIMRLVIGDSVRLEVDGAERTMRIVKISGSNGQIFMAPIHEANVDARNTDKQDAFTYTSKYAGSLQKAKTRRVTISPIGEVRDPGFKG

SEQ ID NO: 77 - protein, 1168 aa, Azospirillum sp.
  source 1..1168: note = B510
MARPAFRAPRREHVNGWTPDPHRISKPFFILVSWHLLSRVVIDSSSGCFPGTSRDHTDKFAEWECAVQPYRLSFDLGTNSIGWGLLNLDRQGKPREIRALGSRIFSDGRDPQDKASLAVARRLARQMRRRRDRYLTRRTRLMGALVRFGLMPADPAARKRLEVAVDPYLARERATRERLEPFEIGRALFHLNQRRGYKPVRTATKPDEEAGKVKEAVERLEAAIAAAGAPTLGAWFAWRKTRGETLRARLAGKGKEAAYPFYPARRMLEAEFDTLWAEQARHHPDLLTAEAREILRHRIFHQRPLKPPPVGRCTLYPDDGRAPRALPSAQRLRLFQELASLRVIHLDLSERPLTPAERDRIVAFVQGRPPKAGRKPGKVQKSVPFEKLRGLLELPPGTGFSLESDKRPELLGDETGARIAPAFGPGWTALPLEEQDALVELLLTEAEPERAIAALTARWALDEATAAKLAGATLPDFHGRYGRRAVAELLPVLERETRGDPDGRVRPIRLDEAVKLLRGGKDHSDFSREGALLDALPYYGAVLERHVAFGTGNPADPEEKRVGRVANPTVHIALNQLRHLVNAILARHGRPEEIVIELARDLKRSAEDRRREDKRQADNQKRNEERKRLILSLGERPTPRNLLKLRLWEEQGPVENRRCPYSGETISMRMLLSEQVDIDHILPFSVSLDDSAANKVVCLREANRIKRNRSPWEAFGHDSERWAGILARAEALPKNKRWRFAPDALEKLEGEGGLRARHLNDTRHLSRLAVEYLRCVCPKVRVSPGRLTALLRRRWGIDAILAEADGPPPEVPAETLDPSPAEKNRADHRHHALDAVVIGCIDRSMVQRVQLAAASAEREAAAREDNIRRVLEGFKEEPWDGFRAELERRARTIVVSHRPEHGIGGALHKETAYGPVDPPEEGFNLVVRKPIDGLSKDEINSVRDPRLRRALIDRLAIRRRDANDPATALAKAAEDLAAQPASRGIRRVRVLKKESNPIRVEHGGNPSGPRSGGPFHKLLLAGEVHHVDVALRADGRRWVGHWVTLFEAHGGRGADGAAAPPRLGDGERFLMRLHKGDCLKLEHKGRVRVMQVVKLEPSSNSVVVVEPHQVKTDRSKHVKISCDQLRARGARRVTVDPLGRVRVHAPGARVGIGGDAGRTAMEPAEDIS

SEQ ID NO: 78 - protein, 1064 aa, Bradyrhizobium sp.
  source 1..1064: note = BTAi1
MKRTSLRAYRLGVDLGANSLGWFVVWLDDHGQPEGLGPGGVRIFPDGRNPQSKQSNAAGRRLARSARRRRDRYLQRRGKLMGLLVKHGLMPADEPARKRLECLDPYGLRAKALDEVLPLHHVGRALFHLNQRRGLFANRAIEQGDKDASAIKAAAGRLQTSMQACGARTLGEFLNRRHQLRATVRARSPVGGDVQARYEFYPTRAMVDAEFEAIWAAQAPHHPTMTAEAHDTIREAIFSQRAMKRPSIGKCSLDPATSQDDVDGFRCAWSHPLAQRFRIWQDVRNLAVVETGPTSSRLGKEDQDKVARALLQTDQLSFDEIRGLLGLPSDARFNLESDRRDHLKGDATGAILSARRHFGPAWHDRSLDRQIDIVALLESALDEAAIIASLGTTHSLDEAAAQRALSALLPDGYCRLGLRAIKRVLPLMEAGRTYAEAASAAGYDHALLPGGKLSPTGYLPYYGQWLQNDVVGSDDERDTNERRWGRLPNPTVHIGIGQLRRVVNELIRWHGPPAEITVELTRDLKLSPRRLAELEREQAENQRKNDKRTSLLRKLGLPASTHNLLKLRLWDEQGDVASECPYTGEAIGLERLVSDDVDIDHLIPFSISWDDSAANKVVCMRYANREKGNRTPFEAFGHRQGRPYDWADIAERAARLPRGKRWRFGPGARAQFEELGDFQARLLNETSWLARVAKQYLAAVTHPHRIHVLPGRLTALLRATWELNDLLPGSDDRAAKSRKDHRHHAIDALVAALTDQALLRRMANAHDDTRRKIEVLLPWPTFRIDLETRLKAMLVSHKPDHGLQARLHEDTAYGTVEHPETEDGANLVYRKTFVDISEKEIDRIRDRRLRDLVRAHVAGERQQGKTLKAAVLSFAQRRDIAGHPNGIRHVRLTKSIKPDYLVPIRDKAGRIYKSYNAGENAFVDILQAESGRWIARATTVFQANQANESHDAPAAQPIMRVFKGDMLRIDHAGAEKFVKIVRLSPSNNLLYLVEHHQAGVFQTRHDDPEDSFRWLFASFDKLREWNAELVRIDTLGQPWRRKRGLETGSEDATRIGWTRPKKWP

SEQ ID NO: 79 - protein, 1037 aa, Parvibaculum lavamentivorans
  source 1..1037: note = DS1
MERIFGFDIGTTSIGFSVIDYSSTQSAGNIQRLGVRIFPEARDPDGTPLNQQRRQKRMMRRQLRRRRIRRKALNETLHEAGFLPAYGSADWPVVMADEPYELRRRGLEEGLSAYEFGRAIYHLAQHRHFKGRELEESDTPDPDVDDEKEAANERAATLKALKNEQTTLGAWLARRPPSDRKRGIHAHRNVVAEEFERLWEVQSKFHPALKSEEMRARISDTIFAQRPVFWRKNTLGECRFMPGEPLCPKGSWLSQQRRMLEKLNNLAIAGGNARPLDAEERDAILSKLQQQASMSWPGVRSALKALYKQRGEPGAEKSLKFNLELGGESKLLGNALEAKLADMFGPDWPAHPRKQEIRHAVHERLWAADYGETPDKKRVIILSEKDRKAHREAAANSFVADFGITGEQAAQLQALKLPTGWEPYSIPALNLFLAELEKGERFGALVNGPDWEGWRRTNFPHRNQPTGEILDKLPSPASKEERERISQLRNPTVVRTQNELRKVVNNLIGLYGKPDRIRIEVGRDVGKSKREREEIQSGIRRNEKQRKKATEDLIKNGIANPSRDDVEKWILWKEGQERCPYTGDQIGFNALFREGRYEVEHIWPRSRSFDNSPRNKTLCRKDVNIEKGNRMPFEAFGHDEDRWSAIQIRLQGMVSAKGGTGMSPGKVKRFLAKTMPEDFAARQLNDTRYAAKQILAQLKRLWPDMGPEAPVKVEAVTGQVTAQLRKLWTLNNILADDGEKTRADHRHHAIDALTVACTHPGMTNKLSRYWQLRDDPRAEKPALTPPWDTIRADAEKAVSEIVVSHRVRKKVSGPLHKETTYGDTGTDIKTKSGTYRQFVTRKKIESLSKGELDEIRDPRIKEIVAAHVAGRGGDPKKAFPPYPCVSPGGPEIRKVRLTSKQQLNLMAQTGNGYADLGSNHHIAIYRLPDGKADFEIVSLFDASRRLAQRNPIVQRTRADGASFVMSLAAGEAIMIPEGSKKGIWIVQGVWASGQVVLERDTDADHSTTTRPMPNPILKDDAKKVSIDPIGRVRPSND

SEQ ID NO: 80 - protein, 1218 aa, Prevotella timonensis
  source 1..1218: note = CRIS 5CB1
MNKRILGLDTGTNSLGWAVVDWDEHAQSYELIKYGDVIFQEGVKIEKGIESSKAAERSGYKAIRKQYFRRRLRKIQVLKVLVKYHLCPYLSDDDLRQWHLQKQYPKSDELMLWQRTSDEEGKNPYYDRHRCLHEKLDLTVEADRYTLGRALYHLTQRRGFLSNRLDTSADNKEDGVVKSGISQLSTEMEEAGCEYLGDYFYKLYDAQGNKVRIRQRYTDRNKHYQHEFDAICEKQELSSELIEDLQRAIFFQLPLKSQRHGVGRCTFERGKPRCADSHPDYEEFRMLCFVNNIQVKGPHDLELRPLTYEEREKIEPLFFRKSKPNFDFEDIAKALAGKKNYAWIHDKEERAYKFNYRMTQGVPGCPTIAQLKSIFGDDWKTGIAETYTLIQKKNGSKSLQEMVDDVWNVLYSFSSVEKLKEFAHHKLQLDEESAEKFAKIKLSHSFAALSLKAIRKFLPFLRKGMYYTHASFFANIPTIVGKEIWNKEQNRKYIMENVGELVFNYQPKHREVQGTIEMLIKDFLANNFELPAGATDKLYHPSMIETYPNAQRNEFGILQLGSPRTNAIRNPMAMRSLHILRRVVNQLLKESIIDENTEVHVEYARELNDANKRRAIADRQKEQDKQHKKYGDEIRKLYKEETGKDIEPTQTDVLKFQLWEEQNHHCLYTGEQIGITDFIGSNPKFDIEHTIPQSVGGDSTQMNLTLCDNRFNREVKKAKLPTELANHEEILTRIEPWKNKYEQLVKERDKQRTFAGMDKAVKDIRIQKRHKLQMEIDYWRGKYERFTMTEVPEGFSRRQGTGIGLISRYAGLYLKSLFHQADSRNKSNVYVVKGVATAEFRKMWGLQSEYEKKCRDNHSHHCMDAITIACIGKREYDLMAEYYRMEETFKQGRGSKPKFSKPWATFTEDVLNIYKNLLVVHDTPNNMPKHTKKYVQTSIGKVLAQGDTARGSLHLDTYYGAIERDGEIRYVVRRPLSSFTKPEELENIVDETVKRTIKEAIADKNFKQAIAEPIYMNEEKGILIKKVRCFAKSVKQPINIRQHRDLSKKEYKQQYHVMNENNYLLAIYEGLVKNKVVREFEIVSYIEAAKYYKRSQDRNIFSSIVPTHSTKYGLPLKTKLLMGQLVLMFEENPDEIQVDNTKDLVKRLYKVVGIEKDGRIKFKYHQEARKEGLPIFSTPYKNNDDYAPIFRQSINNINILVDGIDFTIDILGKVTLKE

SEQ ID NO: 81 - protein, 1088 aa, Bacillus smithii
  source 1..1088: note = 7 3 47FAA
MNYKMGLDIGIASVGWAVINLDLKRIEDLGVRIFDKAEHPQNGESLALPRRIARSARRRLRRRKHRLERIRRLLVSENVLTKEEMNLLFKQKKQIDVWQLRVDALERKLNNDELARVLLHLAKRRGFKSNRKSERNSKESSEFLKNIEENQSILAQYRSVGEMIVKDSKFAYHKRNKLDSYSNMIARDDLEREIKLIFEKQREFNNPVCTERLEEKYLNIWSSQRPFASKEDIEKKVGFCTFEPKEKRAPKATYTFQSFIVWEHINKLRLVSPDETRALTEIERNLLYKQAFSKNKMTYYDIRKLLNLSDDIHFKGLLYDPKSSLKQIENIRFLELDSYHKIRKCIENVYGKDGIRMFNETDIDTFGYALTIFKDDEDIVAYLQNEYITKNGKRVSNLANKVYDKSLIDELLNLSFSKFAHLSMKAIRNILPYMEQGEIYSKACELAGYNFTGPKKKEKALLLPVIPNIANPVVMRALTQSRKVVNAIIKKYGSPVSIHIELARDLSHSFDERKKIQKDQTENRKKNETAIKQLIEYELTKNPTGLDIVKFKLWSEQQGRCMYSLKPIELERLLEPGYVEVDHILPYSRSLDDSYANKVLVLTKENREKGNHTPVEYLGLGSERWKKFEKFVLANKQFSKKKKQNLLRLRYEETEEKEFKERNLNDTRYISKFFANFIKEHLKFADGDGGQKVYTINGKITAHLRSRWDFNKNREESDLHHAVDAVIVACATQGMIKKITEFYKAREQNKESAKKKEPIFPQPWPHFADELKARLSKFPQESIEAFALGNYDRKKLESLRPVFVSRMPKRSVTGAAHQETLRRCVGIDEQSGKIQTAVKTKLSDIKLDKDGHFPMYQKESDPRTYEAIRQRLLEHNNDPKKAFQEPLYKPKKNGEPGPVIRTVKIIDTKNKVVHLDGSKTVAYNSNIVRTDVFEKDGKYYCVPVYTMDIMKGTLPNKAIEANKPYSEWKEMTEEYTFQFSLFPNDLVRIVLPREKTIKTSTNEEIIIKDIFAYYKTIDSATGGLELISHDRNFSLRGVGSKTLKRFEKYQVDVLGNIHKVKGEKRVGLAAPTNQKKGKTVDSLQSVSD

SEQ ID NO: 82 - protein, 1035 aa, unidentified
  source 1..1035: note = Cand. Puniceispirillum marinum IMCC1322
MRRLGLDLGTNSIGWCLLDLGDDGEPVSIFRTGARIFSDGRDPKSLGSLKATRREARLTRRRRDRFIQRQKNLINALVKYGLMPADEIQRQALAYKDPYPIRKKALDEAIDPYEMGRAIFHINQRRGFKSNRKSADNEAGVVKQSIADLEMKLGEAGARTIGEFLADRQATNDTVRARRLSGTNALYEFYPDRYMLEQEFDTLWAKQAAFNPSLYIEAARERLKEIVFFQRKLKPQEVGRCIFLSDEDRISKALPSFQRFRIYQELSNLAWIDHDGVAHRITASLALRDHLFDELEHKKKLTFKAMRAILRKQGVVDYPVGFNLESDNRDHLIGNLTSCIMRDAKKMIGSAWDRLDEEEQDSFILMLQDDQKGDDEVRSILTQQYGLSDDVAEDCLDVRLPDGHGSLSKKAIDRILPVLRDQGLIYYDAVKEAGLGEANLYDPYAALSDKLDYYGKALAGHVMGASGKFEDSDEKRYGTISNPTVHIALNQVRAVVNELIRLHGKPDEVVIEIGRDLPMGADGKRELERFQKEGRAKNERARDELKKLGHIDSRESRQKFQLWEQLAKEPVDRCCPFTGKMMSISDLFSDKVEIEHLLPFSLTLDDSMANKTVCFRQANRDKGNRAPFDAFGNSPAGYDWQEILGRSQNLPYAKRWRFLPDAMKRFEADGGFLERQLNDTRYISRYTTEYISTIIPKNKIWVVTGRLTSLLRGFWGLNSILRGHNTDDGTPAKKSRDDHRHHAIDAIVVGMTSRGLLQKVSKAARRSEDLDLTRLFEGRIDPWDGFRDEVKKHIDAIIVSHRPRKKSQGALHNDTAYGIVEHAENGASTVVHRVPITSLGKQSDIEKVRDPLIKSALLNETAGLSGKSFENAVQKWCADNSIKSLRIVETVSIIPITDKEGVAYKGYKGDGNAYMDIYQDPTSSKWKGEIVSRFDANQKGFIPSWQSQFPTARLIMRLRINDLLKLQDGEIEEIYRVQRLSGSKILMAPHTEANVDARDRDKNDTFKLTSKSPGKLQSASARKVHISPTGLIREG

SEQ ID NO: 83 - protein, 1153 aa, Barnesiella intestinihominis
  source 1..1153: note = YIT 11860
MKNILGLDLGLSSIGWSVIRENSEEQELVAMGSRVVSLTAAELSSFTQGNGVSINSQRTQKRTQRKGYDRYQLRRTLLRNKLDTLGMLPDDSLSYLPKLQLWGLRAKAVTQRIELNELGRVLLHLNQKRGYKSIKSDFSGDKKITDYVKTVKTRYDELKEMRLTIGELFFRRLTENAFFRCKEQVYPRQAYVEEFDCIMNCQRKFYPDILTDETIRCIRDEIIYYQRPLKSCKYLVSRCEFEKRFYLNAAGKKTEAGPKVSPRTSPLFQVCRLWESINNIVVKDRRNEIVFISAEQRAALFDFLNTHEKLKGSDLLKLLGLSKTYGYRLGEQFKTGIQGNKTRVEIERALGNYPDKKRLLQFNLQEESSSMVNTETGEIIPMISLSFEQEPLYRLWHVLYSIDDREQLQSVLRQKFGIDDDEVLERLSAIDLVKAGFGNKSSKAIRRILPFLQLGMNYAEACEAAGYNHSNNYTKAENEARALLDRLPAIKKNELRQPVVEKILNQMVNVVNALMEKYGRFDEIRVELARELKQSKEERSNTYKSINKNQRENEQIAKRIVEYGVPTRSRIQKYKMWEESKHCCIYCGQPVDVGDFLRGFDVEVEHIIPKSLYFDDSFANKVCSCRSCNKEKNNRTAYDYMKSKGEKALSDYVERVNTMYTNNQISKTKWQNLLTPVDKISIDFIDRQLRESQYIARKAKEILTSICYNVTATSGSVTSFLRHVWGWDTVLHDLNFDRYKKVGLTEVIEVNHRGSVIRREQIKDWSKRFDHRHHAIDALTIACTKQAYIQRLNNLRAEEGPDFNKMSLERYIQSQPHFSVAQVREAVDRILVSFRAGKRAVTPGKRYIRKNRKRISVQSVLIPRGALSEESVYGVIHVWEKDEQGHVIQKQRAVMKYPITSINREMLDKEKVVDKRIHRILSGRLAQYNDNPKEAFAKPVYIDKECRIPIRTVRCFAKPAINTLVPLKKDDKGNPVAWVNPGNNHHVAIYRDEDGKYKERTVTFWEAVDRCRVGIPAIVTQPDTIWDNILQRNDISENVLESLPDVKWQFVLSLQQNEMFILGMNEEDYRYAMDQQDYALLNKYLYRVQKLSKSDYSFRYHTETSVEDKYDGKPNLKLSMQMGKLKRVSIKSLLGLNPHKVHISVLGEIKEIS

SEQ ID NO: 84 - protein, 1062 aa, Ralstonia syzygii
  source 1..1062: note = R24
MAEKQHRWGLDIGTNSIGWAVIALIEGRPAGLVATGSRIFSDGRNPKDGSSLAVERRGPRQMRRRRDRYLRRRDRFMQALINVGLMPGDAAARKALVTENPYVLRQRGLDQALTLPEFGRALFHLNQRRGFQSNRKTDRATAKESGKVKNAIAAFRAGMGNARTVGEALARRLEDGRPVRARMVGQGKDEHYELYIAREWIAQEFDALWASQQRFHAEVLADAARDRLRAILLFQRKLLPVPVGKCFLEPNQPRVAAALPSAQRFRLMQELNHLRVMTLADKRERPLSFQERNDLLAQLVARPKCGFDMLRKIVFGANKEAYRFTIESERRKELKGCDTAAKLAKVNALGTRWQALSLDEQDRLVCLLLDGENDAVLADALREHYGLTDAQIDTLLGLSFEDGHMRLGRSALLRVLDALESGRDEQGLPLSYDKAVVAAGYPAHTADLENGERDALPYYGELLWRYTQDAPTAKNDAERKFGKIANPTVHIGLNQLRKLVNALIQRYGKPAQIVVELARNLKAGLEEKERIKKQQTANLERNERIRQKLQDAGVPDNRENRLRMRLFEELGQGNGLGTPCIYSGRQISLQRLFSNDVQVDHILPFSKTLDDSFANKVLAQHDANRYKGNRGPFEAFGANRDGYAWDDIRARAAVLPRNKRNRFAETAMQDWLHNETDFLARQLTDTAYLSRVARQYLTAICSKDDVYVSPGRLTAMLRAKWGLNRVLDGVMEEQGRPAVKNRDDHRHHAIDAVVIGATDRAMLQQVATLAARAREQDAERLIGDMPTPWPNFLEDVRAAVARCVVSHKPDHGPEGGLHNDTAYGIVAGPFEDGRYRVRHRVSLFDLKPGDLSNVRCDAPLQAELEPIFEQDDARAREVALTALAERYRQRKVWLEELMSVLPIRPRGEDGKTLPDSAPYKAYKGDSNYCYELFINERGRWDGELISTFRANQAAYRRFRNDPARFRRYTAGGRPLLMRLCINDYIAVGTAAERTIFRVVKMSENKITLAEHFEGGTLKQRDADKDDPFKYLTKSPGALRDLGARRIFVDLIGRVLDPGIKGD

SEQ ID NO: 85 - protein, 1060 aa, Homo sapiens
MEQLNELELLMEKSFWEEAELPAELFQKKVVASFPRTVLSTGMDNRYLVLAVNTVQNKEGNCEKRLVITASQSLENKELCILRNDWCSVPVEPGDIIHLEGDCTSDTWIIDKDFGYLILYPDMLISGTSIASSIRCMRRAVLSETFRSSDPATRQMLIGTVLHEVFQKAINNSFAPEKLQELAFQTIQEIRHLKEMYRLNLSQDEIKQEVEDYLPSFCKWAGDFMHKNTSTDFPQMQLSLPSDNSKDNSTCNIEVVKPMDIEESIWSPRFGLKGKIDVTVGVKIHRGYKTKYKIMPLELKTGKESNSIEHRSQVVLYTLLSQERRADPEAGLLLYLKTGQMYPVPANHLDKRELLKLRNQMAFSLFHRISKSATRQKTQLASLPQIIEEEKTCKYCSQIGNCALYSRAVEQQMDCSSVPIVMLPKIEEETQHLKQTHLEYFSLWCLMLTLESQSKDNKKNHQNIWLMPASEMEKSGSCIGNLIRMEHVKIVCDGQYLHNFQCKHGAIPVTNLMAGDRVIVSGEERSLFALSRGYVKEINMTTVTCLLDRNLSVLPESTLFRLDQEEKNCDIDTPLGNLSKLMENTFVSKKLRDLIIDFREPQFISYLSSVLPHDAKDTVACILKGLNKPQRQAMKKVLLSKDYTLIVGMPGTGKTTTICTLVRILYACGFSVLLTSYTHSAVDNILLKLAKFKIGFLRLGQIQKVHPAIQQFTEQEICRSKSIKSLALLEELYNSQLIVATTCMGINHPIFSRKIFDFCIVDEASQISQPICLGPLFFSRRFVLVGDHQQLPPLVLNREARALGMSESLFKRLEQNKSAVVQLTVQYRMNSKIMSLSNKLTYEGKLECGSDKVANAVINLRHFKDVKLELEFYADYSDNPWLMGVFEPNNPVCFLNTDKVPAPEQVEKGGVSNVTEAKLIVFLTSIFVKAGCSPSDIGIIAPYRQQLKIINDLLARSIGMVEVNTVDKYQGRDKSIVLVSFVRSNKDGTVGELLKDWRRLNVAITRAKHKLILLGCVPSLNCYPPLEKLLNHLNSEKLIIDLPSREHESLCHILGDFQRE

SEQ ID NO: 86 - protein, 1059 aa, Wolinella succinogenes
  source 1..1059: note = DSM 1740
MIERILGVDLGISSLGWAIVEYDKDDEAANRIIDCGVRLFTAAETPKKKESPNKARREARGIRRVLNRRRVRMNMIKKLFLRAGLIQDVDLDGEGGMFYSKANRADVWELRHDGLYRLLKGDELARVLIHIAKHRGYKFIGDDEADEESGKVKKAGVVLRQNFEAAGCRTVGEWLWRERGANGKKRNKHGDYEISIHRDLLVEEVEAIFVAQQEMRSTIATDALKAAYREIAFFVRPMQRIEKMVGHCTYFPEERRAPKSAPTAEKFIAISKFFSTVIIDNEGWEQKIIERKTLEELLDFAVSREKVEFRHLRKFLDLSDNEIFKGLHYKGKPKTAKKREATLFDPNEPTELEFDKVEAEKKAWISLRGAAKLREALGNEFYGRFVALGKHADEATKILTYYKDEGQKRRELTKLPLEAEMVERLVKIGFSDFLKLSLKAIRDILPAMESGARYDEAVLMLGVPHKEKSAILPPLNKTDIDILNPTVIRAFAQFRKVANALVRKYGAFDRVHFELAREINTKGEIEDIKESQRKNEKERKEAADWIAETSFQVPLTRKNILKKRLYIQQDGRCAYTGDVIELERLFDEGYCEIDHILPRSRSADDSFANKVLCLARANQQKTDRTPYEWFGHDAARWNAFETRTSAPSNRVRTGKGKIDRLLKKNFDENSEMAFKDRNLNDTRYMARAIKTYCEQYWVFKNSHTKAPVQVRSGKLTSVLRYQWGLESKDRESHTHHAVDAIIIAFSTQGMVQKLSEYYRFKETHREKERPKLAVPLANFRDAVEEATRIENTETVKEGVEVKRLLISRPPRARVTGQAHEQTAKPYPRIKQVKNKKKWRLAPIDEEKFESFKADRVASANQKNFYETSTIPRVDVYHKKGKFHLVPIYLHEMVLNELPNLSLGTNPEAMDENFFKFSIFKDDLISIQTQGTPKKPAKIIMGYFKNMHGANMVLSSINNSPCEGFTCTPVSMDKKHKDKCKLCPEENRIAGRCLQGFLDYWSQEGLRPPRKEFECDQGVKFALDVKKYQIDPLGYYYEVKQEKRLGTIPQMRSAKKLVKK

SEQ ID NO: 87 - protein, 1269 aa, Mycoplasma gallisepticum
  source 1..1269: note = str. F
MNNSIKSKPEVTIGLDLGVGSVGWAIVDNETNIIHHLGSRLFSQAKTAEDRRSFRGVRRLIRRRKYKLKRFVNLIWKYNSYFGFKNKEDILNNYQEQQKLHNTVLNLKSEALNAKIDPKALSWILHDYLKNRGHFYEDNRDFNVYPTKELAKYFDKYGYYKGIIDSKEDNDNKLEEELTKYKFSNKHWLEEVKKVLSNQTGLPEKFKEEYESLFSYVRNYSEGPGSINSVSPYGIYHLDEKEGKVVQKYNNIWDKTIGKCNIFPDEYRAPKNSPIAMIFNEINELSTIRSYSIYLTGWFINQEFKKAYLNKLLDLLIKTNGEKPIDARQFKKLREETIAESIGKETLKDVENEEKLEKEDHKWKLKGLKLNTNGKIQYNDLSSLAKFVHKLKQHLKLDFLLEDQYATLDKINFLQSLFVYLGKHLRYSNRVDSANLKEFSDSNKLFERILQKQKDGLFKLFEQTDKDDEKILAQTHSLSTKAMLLAITRMTNLDNDEDNQKNNDKGWNFEAIKNFDQKFIDITKKNNNLSLKQNKRYLDDRFINDAILSPGVKRILREATKVFNAILKQFSEEYDVTKVVIELARELSEEKELENTKNYKKLIKKNGDKISEGLKALGISEDEIKDILKSPTKSYKFLLWLQQDHIDPYSLKEIAFDDIFTKTEKFEIDHIIPYSISFDDSSSNKLLVLAESNQAKSNQTPYEFISSGNAGIKWEDYEAYCRKFKDGDSSLLDSTQRSKKFAKMMKTDTSSKYDIGFLARNLNDTRYATIVFRDALEDYANNHLVEDKPMFKVVCINGSVTSFLRKNFDDSSYAKKDRDKNIHHAVDASIISIFSNETKTLFNQLTQFADYKLFKNTDGSWKKIDPKTGVVTEVTDENWKQIRVRNQVSEIAKVIEKYIQDSNIERKARYSRKIENKTNISLFNDTVYSAKKVGYEDQIKRKNLKTLDIHESAKENKNSKVKRQFVYRKLVNVSLLNNDKLADLFAEKEDILMYRANPWVINLAEQIFNEYTENKKIKSQNVFEKYMLDLTKEFPEKFSEFLVKSMLRNKTAIIYDDKKNIVHRIKRLKMLSSELKENKLSNVIIRSKNQSGTKLSYQDTINSLALMIMRSIDPTAKKQYIRVPLNTLNLHLGDHDFDLHNMDAYLKKPKFVKYLKANEIGDEYKPWRVLTSGTLLIHKKDKKLMYISSFQNLNDVIEIKNLIETEYKENDDSDSKKKKKANRFLMTLSTILNDYILLDAKDNFDILGLSKNRIDEILNSKLGLDKIVK

SEQ ID NO: 88 - protein, 1138 aa, Acidothermus cellulolyticus
  source 1..1138: note = 11B
MGGSEVGTVPVTWRLGVDVGERSIGLAAVSYEEDKPKEILAAVSWIHDGGVGDERSGASRLALRGMARRARRLRRFRRARLRDLDMLLSELGWTPLPDKNVSPVDAWLARKRLAEEYVVDETERRRLLGYAVSHMARHRGWRNPWTTIKDLKNLPQPSDSWERTRESLEARYSVSLEPGTVGQWAGYLLQRAPGIRLNPTQQSAGRRAELSNATAFETRLRQEDVLWELRCIADVQGLPEDVVSNVIDAVFCQKRPSVPAERIGRDPLDPSQLRASRACLEFQEYRIVAAVANLRIRDGSGSRPLSLEERNAVIEALLAQTERSLTWSDIALEILKLPNESDLTSVPEEDGPSSLAYSQFAPFDETSARIAEFIAKNRRKIPTFAQWWQEQDRTSRSDLVAALADNSIAGEEEQELLVHLPDAELEALEGLALPSGRVAYSRLTLSGLTRVMRDDGVDVHNARKTCFGVDDNWRPPLPALHEATGHPVVDRNLAILRKFLSSATMRWGPPQSIVVELARGASESRERQAEEEAARRAHRKANDRIRAELRASGLSDPSPADLVRARLLELYDCHCMYCGAPISWENSELDHIVPRTDGGSNRHENLAITCGACNKEKGRRPFASWAETSNRVQLRDVIDRVQKLKYSGNMYWTRDEFSRYKKSVVARLKRRTSDPEVIQSIESTGYAAVALRDRLLSYGEKNGVAQVAVFRGGVTAEARRWLDISIERLFSRVAIFAQSTSTKRLDRRHHAVDAVVLTTLTPGVAKTLADARSRRVSAEFWRRPSDVNRHSTEEPQSPAYRQWKESCSGLGDLLISTAARDSIAVAAPLRLRPTGALHEETLRAFSEHTVGAAWKGAELRRIVEPEVYAAFLALTDPGGRFLKVSPSEDVLPADENRHIVLSDRVLGPRDRVKLFPDDRGSIRVRGGAAYIASFHHARVFRWGSSHSPSFALLRVSLADLAVAGLLRDGVDVFTAELPPWTPAWRYASIALVKAVESGDAKQVGWLVPGDELDFGPEGVTTAAGDLSMFLKYFPERHWVVTGFEDDKRINLKPAFLSAEQAEVLRTERSDRPDTLTEAGEILAQFFPRCWRATVAKVLCHPGLTVIRRTALGQPRWRRGHLPYSWRPWSADPWSGGTP

SEQ ID NO: 89 - protein, 1265 aa, Mycoplasma ovipneumoniae
  source 1..1265: note = SC01
MHNKKNITIGFDLGIASIGWAIIDSTTSKILDWGTRTFEERKTANERRAFRSTRRNIRRKAYRNQRFINLILKYKDLFELKNISDIQRANKKDTENYEKIISFFTEIYKKCAAKHSNILEVKVKALDSKIEKLDLIWILHDYLENRGFFYDLEEENVADKYEGIEHPSILLYDFFKKNGFFKSNSSIPKDLGGYSFSNLQWVNEIKKLFEVQEINPEFSEKFLNLFTSVRDYAKGPGSEHSASEYGIFQKDEKGKVFKKYDNIWDKTIGKCSFFVEENRSPVNYPSYEIFNLLNQLINLSTDLKTTNKKIWQLSSNDRNELLDELLKVKEKAKIISISLKKNEIKKIILKDFGFEKSDIDDQDTIEGRKIIKEEPTTKLEVTKHLLATIYSHSSDSNWININNILEFLPYLDAICIILDREKSRGQDEVLKKLTEKNIFEVLKIDREKQLDFVKSIFSNTKFNFKKIGNFSLKAIREFLPKMFEQNKNSEYLKWKDEEIRRKWEEQKSKLGKTDKKTKYLNPRIFQDEIISPGTKNTFEQAVLVLNQIIKKYSKENIIDAIIIESPREKNDKKTIEEIKKRNKKGKGKTLEKLFQILNLENKGYKLSDLETKPAKLLDRLRFYHQQDGIDLYTLDKINIDQLINGSQKYEIEHIIPYSMSYDNSQANKILTEKAENLKKGKLIASEYIKRNGDEFYNKYYEKAKELFINKYKKNKKLDSYVDLDEDSAKNRFRFLTLQDYDEFQVEFLARNLNDTRYSTKLFYHALVEHFENNEFFTYIDENSSKHKVKISTIKGHVTKYFRAKPVQKNNGPNENLNNNKPEKIEKNRENNEHHAVDAAIVAIIGNKNPQIANLLTLADNKTDKKFLLHDENYKENIETGELVKIPKFEVDKLAKVEDLKKIIQEKYEEAKKHTAIKFSRKTRTILNGGLSDETLYGFKYDEKEDKYFKIIKKKLVTSKNEELKKYFENPFGKKADGKSEYTVLMAQSHLSEFNKLKEIFEKYNGFSNKTGNAFVEYMNDLALKEPTLKAEIESAKSVEKLLYYNFKPSDQFTYHDNINNKSFKRFYKNIRIIEYKSIPIKFKILSKHDGGKSFKDTLFSLYSLVYKVYENGKESYKSIPVTSQMRNFGIDEFDFLDENLYNKEKLDIYKSDFAKPIPVNCKPVFVLKKGSILKKKSLDIDDFKETKETEEGNYYFISTISKRFNRDTAYGLKPLKLSVVKPVAEPSTNPIFKEYIPIHLDELGNEYPVKIKEHTDDEKLMCTIK

SEQ ID NO: 90 - skipped

SEQ ID NO: 91 - RNA, 96 nt, synthetic construct
  misc_feature 1..96: note = Synthetic
  misc_difference 1..20: note = misc_feature - n is a, c, g, or u
  source 1..96: mol_type = other RNA
nnnnnnnnnnnnnnnnnnnngtttaagagctagaaatagcaagtttaaataaggctagtccgttatcaacttgaaaaagtggcaccgagtcggtgc

SEQ ID NO: 92 - RNA, 116 nt, synthetic construct
  misc_feature 1..116: note = Synthetic
  misc_difference 1..20: note = misc_feature - n is a, c, g, or u
  source 1..116: mol_type = other RNA
nnnnnnnnnnnnnnnnnnnngtattagagctatgctgtattggaaacaatacagcatagcaagttaatataaggctagtccgttatcaacttgaaaaagtggcaccgagtcggtgc

SEQ ID NO: 93-99 - skipped (7 entries)

SEQ ID NO: 100 - RNA, 47 nt, synthetic construct
  misc_feature 1..47: note = Synthetic
  source 1..47: mol_type = other RNA
aaggctagtccgttatcaacttgaaaaagtggcaccgagtcggtgct

SEQ ID NO: 101 - RNA, 49 nt, synthetic construct
  misc_feature 1..49: note = Synthetic
  source 1..49: mol_type = other RNA
aaggctagtccgttatcaacttgaaaaagtggcaccgagtcggtggtgc

SEQ ID NO: 102 - RNA, 51 nt, synthetic construct
  misc_feature 1..51: note = Synthetic
  source 1..51: mol_type = other RNA
aaggctagtccgttatcaacttgaaaaagtggcaccgagtcggtgcggatc

SEQ ID NO: 103 - RNA, 31 nt, synthetic construct
  misc_feature 1..31: note = Synthetic
  source 1..31: mol_type = other RNA
aaggctagtccgttatcaacttgaaaaagtg

SEQ ID NO: 104 - RNA, 18 nt, synthetic construct
  misc_feature 1..18: note = Synthetic
  source 1..18: mol_type = other RNA
aaggctagtccgttatca

SEQ ID NO: 105 - RNA, 12 nt, synthetic construct
  misc_feature 1..12: note = Synthetic
  source 1..12: mol_type = other RNA
aaggctagtccg

SEQ ID NO: 106 - RNA, 102 nt, synthetic construct
  misc_feature 1..102: note = Synthetic
  misc_difference 1..20: note = misc_feature - n is a, c, g, or u
  source 1..102: mol_type = other RNA
nnnnnnnnnnnnnnnnnnnngttttagagctagaaatagcaagttaaaataaggctagtccgttatcaacttgaaaaagtggcaccgagtcggtgctttttt

SEQ ID NO: 107 - RNA, 102 nt, synthetic construct
  misc_feature 1..102: note = Synthetic
  misc_difference 1..20: note = misc_feature - n is a, c, g, or u
  source 1..102: mol_type = other RNA
nnnnnnnnnnnnnnnnnnnngttttagtactctggaaacagaatctactaaaacaaggcaaaatgccgtgtttatctcgtcaacttgttggcgagatttttt

SEQ ID NO: 108 - skipped

SEQ ID NO: 109 - protein, 12 aa, synthetic construct
  REGION 1..12: note = Synthetic
  VARIANT 2: note = misc_feature - Xaa is selected from I, V, M, L or T
  VARIANT 4: note = misc_feature - Xaa is selected from T, I, V, S, N, Y, E or L
  VARIANT 5: note = misc_feature - Xaa is selected from N, S, G, A, D, T, R, M or F
  VARIANT 7: note = misc_feature - Xaa is selected from V, I, L, C, T or F
  VARIANT 9: note = misc_feature - Xaa is selected from W, F, V, Y, S or L
  VARIANT 10: note = misc_feature - Xaa is selected from A, S, C, V or G
  VARIANT 11: note = misc_feature - Xaa is selected from V, I, L, A, M or H
  VARIANT 12: note = misc_feature - Xaa is selected from any amino acid or is absent
DXGXXSXGXXXX

SEQ ID NO: 110 - protein, 12 aa, synthetic construct
  REGION 1..12: note = Synthetic
  VARIANT 4: note = misc_feature - Xaa is selected from T, I, V, S, N, Y, E or L
  VARIANT 5: note = misc_feature - Xaa is selected from N, S, G, A, D, T, R, M or F
  VARIANT 11: note = misc_feature - Xaa is selected from V, I, L, A, M or H
  VARIANT 12: note = misc_feature - Xaa is selected from any amino acid or is absent
DIGXXSVGWAXX

SEQ ID NO: 111 - protein, 12 aa, synthetic construct
  REGION 1..12: note = Synthetic
  VARIANT 12: note = misc_feature - Xaa is a non-polar alkyl amino acid or a hydroxyl amino acid, e.g., X is selected from V, I, L or T
DIGTNSVGWAVX

SEQ ID NO: 112 - protein, 8 aa, synthetic construct
  REGION 1..8: note = Synthetic
  VARIANT 2: note = misc_feature - Xaa is V or H
  VARIANT 3: note = misc_feature - Xaa is I, L or V
  VARIANT 5: note = misc_feature - Xaa is M or T
IXXEXARE

SEQ ID NO: 113 - protein, 8 aa, synthetic construct
  REGION 1..8: note = Synthetic
  VARIANT 3: note = misc_feature - Xaa is I, L or V
IVXEMARE

SEQ ID NO: 114 - protein, 8 aa, synthetic construct
  REGION 1..8: note = Synthetic
  VARIANT 4: note = misc_feature - Xaa is H or L
  VARIANT 7: note = misc_feature - Xaa is R or V
  VARIANT 8: note = misc_feature - Xaa is E or V
HHAXDAXX

SEQ ID NO: 115 - protein, 8 aa, synthetic construct
  REGION 1..8: note = Synthetic
HHAHDAYL

SEQ ID NO: 116 - protein, 6 aa, synthetic construct
  REGION 1..6: note = Synthetic
  VARIANT 2: note = misc_feature - May be replaced with P
  VARIANT 4: note = misc_feature - May be replaced with L, I, or F
  VARIANT 5: note = misc_feature - May be replaced with A or S
  VARIANT 6: note = misc_feature - May be replaced with I, V or F
  SITE 6: note = misc_feature - Residue is attached to SEQ ID NO: 2290 via an N-terminal Ruv-C like domain
KKYVGL

SEQ ID NO: 117 - protein, 27 aa, synthetic construct
  REGION 1..27: note = Synthetic
  VARIANT 1: note = misc_feature - Xaa is selected from D, E, Q or N
  VARIANT 2: note = misc_feature - Xaa is selected from L, I, R, Q, V, M or K
  VARIANT 3: note = misc_feature - Xaa is selected from D or E
  VARIANT 5: note = misc_feature - Xaa is selected from I, V, T, A or L
  VARIANT 6: note = misc_feature - Xaa is selected from V, Y, I, L, F or W
  VARIANT 8: note = misc_feature - Xaa is selected from Q, H, R, K, Y, I, L, F or W
  VARIANT 9: note = misc_feature - Xaa is selected from S, A, D, T or K
  VARIANT 10: note = misc_feature - Xaa is selected from F, L, V, K, Y, M, I, R, A, E, D or Q
  VARIANT 11: note = misc_feature - Xaa is selected from L, R, T, I, V, S, C, Y, K, F or G
  VARIANT 12: note = misc_feature - Xaa is selected from K, Q, Y, T, F, L, W, M, A, E, G, or S
  VARIANT 13: note = misc_feature - Xaa is selected from D, S, N, R, L or T
  VARIANT 14: note = misc_feature - Xaa is selected from D, N or S
  VARIANT 15: note = misc_feature - Xaa is selected from S, A, T, G or R
  VARIANT 16: note = misc_feature - Xaa is selected from I, L, F, S, R, Y, Q, W, D, K or H
  VARIANT 17: note = misc_feature - Xaa is selected from D, S, I, N, E, A, H, F, L, Q, M, G, Y or V
  VARIANT 19: note = misc_feature - Xaa is selected from K, L, R, M, T or F
  VARIANT 20: note = misc_feature - Xaa is selected from V, L, I, A or T
  VARIANT 21: note = misc_feature - Xaa is selected from L, I, V or A
  VARIANT 22: note = misc_feature - Xaa is selected from T, V, C, E, S or A
  VARIANT 23: note = misc_feature - Xaa is selected from R, F, T, W, E, L, N, C, K, V, S, Q, I, Y, H or A
  VARIANT 24: note = misc_feature - Xaa is selected from S, P, R, K, N, A, H, Q, G or L
  VARIANT 25: note = misc_feature - Xaa is selected from D, G, T, N, S, K, A, I, E, L, Q, R or Y
  VARIANT 26: note = misc_feature - Xaa is selected from K, V, A, E, Y, I, C, L, S, T, G, K, M, D or F
XXXHXXPXXXXXXXXXXNXXXXXXXXN

SEQ ID NO: 118 - protein, 27 aa, synthetic construct
  REGION 1..27: note = Synthetic
  VARIANT 1: note = misc_feature - Xaa is selected from D or E
  VARIANT 2: note = misc_feature - Xaa is selected from L, I, R, Q, V, M or K
  VARIANT 3: note = misc_feature - Xaa is selected from D or E
  VARIANT 5: note = misc_feature - Xaa is selected from I, V, T, A or L
  VARIANT 6: note = misc_feature - Xaa is selected from V, Y, I, L, F or W
  VARIANT 8: note = misc_feature - Xaa is selected from Q, H, R, K, Y, I, L, F or W
  VARIANT 10: note = misc_feature - Xaa is selected from F, L, V, K, Y, M, I, R, A, E, D or Q
  VARIANT 11: note = misc_feature - Xaa is selected from L, R, T, I, V, S, C, Y, K, F or G
  VARIANT 12: note = misc_feature - Xaa is selected from K, Q, Y, T, F, L, W, M, A, E, G, or S
  VARIANT 16: note = misc_feature - Xaa is selected from I, L, F, S, R, Y, Q, W, D, K or H
  VARIANT 17: note = misc_feature - Xaa is selected from D, S, I, N, E, A, H, F, L, Q, M, G, Y or V
  VARIANT 22: note = misc_feature - Xaa is selected from T, V, C, E, S or A
  VARIANT 23: note = misc_feature - Xaa is selected from R, F, T, W, E, L, N, C, K, V, S, Q, I, Y, H or A
  VARIANT 24: note = misc_feature - Xaa is selected from S, P, R, K, N, A, H, Q, G or L
  VARIANT 25: note = misc_feature - Xaa is selected from D, G, T, N, S, K, A, I, E, L, Q, R or Y
  VARIANT 26: note = misc_feature - Xaa is selected from K, V, A, E, Y, I, C, L, S, T, G, K, M, D or F
XXXHXXPXSXXXDDSXXNKVLXXXXXN

SEQ ID NO: 119 - protein, 27 aa, synthetic construct
  REGION 1..27: note = Synthetic
  VARIANT 1: note = misc_feature - Xaa is selected from D or E
  VARIANT 3: note = misc_feature - Xaa is selected from D or E
  VARIANT 8: note = misc_feature - Xaa is selected from Q, H, R, K, Y, I, L or W
  VARIANT 10: note = misc_feature - Xaa is selected from F, L, V, K, Y, M, I, R, A, E, D or Q
  VARIANT 11: note = misc_feature - Xaa is selected from L, R, T, I, V, S, C, Y, K, F or G
  VARIANT 12: note = misc_feature - Xaa is selected from K, Q, Y, T, F, L, W, M, A, E, G, or S
  VARIANT 16: note = misc_feature - Xaa is selected from I, L, F, S, R, Y, Q, W, D, K or H
  VARIANT 17: note = misc_feature - Xaa is selected from D, S, I, N, E, A, H, F, L, Q, M, G, Y or V
  VARIANT 23: note = misc_feature - Xaa is selected from R, F, T, W, E, L, N, C, K, V, S, Q, I, Y, H or A
  VARIANT 24: note = misc_feature - Xaa is selected from S, P, R, K, N, A, H, Q, G or L
  VARIANT 25: note = misc_feature - Xaa is selected from D, G, T, N, S, K, A, I, E, L, Q, R or Y
  VARIANT 26: note = misc_feature - Xaa is selected from K, V, A, E, Y, I, C, L, S, T, G, K, M, D or F
XVXHIVPXSXXXDDSXXNKVLTXXXXN

SEQ ID NO: 120 - protein, 27 aa, synthetic construct
  REGION 1..27: note = Synthetic
  VARIANT 2: note = misc_feature - Xaa is selected from I or V
  VARIANT 6: note = misc_feature - Xaa is selected from I or V
  VARIANT 9: note = misc_feature - Xaa is selected from A or S
  VARIANT 11: note = misc_feature - Xaa is selected from I or L
  VARIANT 12: note = misc_feature - Xaa is selected from K or T
  VARIANT 14: note = misc_feature - Xaa is selected from D or N
  VARIANT 19: note = misc_feature - Xaa is selected from R, K or L
  VARIANT 22: note = misc_feature - Xaa is selected from T or V
  VARIANT 23: note = misc_feature - Xaa is selected from S or R
  VARIANT 25: note = misc_feature - Xaa is selected from K, D or A
  VARIANT 26: note = misc_feature - Xaa is selected from E, K, G or N
DXDHIXPQXFXXDXSIDNXVLXXSXXN

SEQ ID NO: 121 - protein, 24 aa, synthetic construct
  REGION 1..24: note = Synthetic
  VARIANT 8: note = misc_feature - Xaa is selected from K or R
  VARIANT 12: note = misc_feature - Xaa is selected from V or T
  VARIANT 13: note = misc_feature - Xaa is selected from G or D
  VARIANT 14: note = misc_feature - Xaa is selected from E, Q or D
  VARIANT 15: note = misc_feature - Xaa is selected from E or D
  VARIANT 19: note = misc_feature - Xaa is selected from D, N or H
  VARIANT 20: note = misc_feature - Xaa is selected from Y, R or N
  VARIANT 23: note = misc_feature - Xaa is selected from Q, D or N
  SITE 24: note = Residue is attached to SEQ ID NO: 2291 via a HNH-like domain
LYYLQNGXDMYXXXXLDIXXLSXY

SEQ ID NO: 122-126 - skipped (5 entries)

SEQ ID NO: 127 - protein, 20 aa, synthetic construct
  REGION 1..20: note = Synthetic
  VARIANT 1..20: note = misc_feature - This sequence may encompass 1-5 repeating GSGS units
GSGSGSGSGSGSGSGSGSGS

SEQ ID NO: 128 - protein, 4 aa, synthetic construct
  REGION 1..4: note = Synthetic
GSGS

SEQ ID NO: 129 - DNA, 4107 bp, Streptococcus pyogenes
  source 1..4107: mol_type = unassigned DNA
atggataaaaagtacagcatcgggctggacatcggtacaaactcagtggggtgggccgtgattacggacgagtacaaggtaccctccaaaaaatttaaagtgctgggtaacacggacagacactctataaagaaaaatcttattggagccttgctgttcgactcaggcgagacagccgaagccacaaggttgaagcggaccgccaggaggcggtataccaggagaaagaaccgcatatgctacctgcaagaaatcttcagtaacgagatggcaaaggttgacgatagctttttccatcgcctggaagaatcctttcttgttgaggaagacaagaagcacgaacggcaccccatctttggcaatattgtcgacgaagtggcatatcacgaaaagtacccgactatctaccacctcaggaagaagctggtggactctaccgataaggcggacctcagacttatttatttggcactcgcccacatgattaaatttagaggacatttcttgatcgagggcgacctgaacccggacaacagtgacgtcgataagctgttcatccaacttgtgcagacctacaatcaactgttcgaagaaaaccctataaatgcttcaggagtcgacgctaaagcaatcctgtccgcgcgcctctcaaaatctagaagacttgagaatctgattgctcagttgcccggggaaaagaaaaatggattgtttggcaacctgatcgccctcagtctcggactgaccccaaatttcaaaagtaacttcgacctggccgaagacgctaagctccagctgtccaaggacacatacgatgacgacctcgacaatctgctggcccagattggggatcagtacgccgatctctttttggcagcaaagaacctgtccgacgccatcctgttgagcgatatcttgagagtgaacaccgaaattactaaagcaccccttagcgcatctatgatcaagcggtacgacgagcatcatcaggatctgaccctgctgaaggctcttgtgaggcaacagctccccgaaaaatacaaggaaatcttctttgaccagagcaaaaacggctacgctggctatatagatggtggggccagtcaggaggaattctataaattcatcaagcccattctcgagaaaatggacggcacagaggagttgctggtcaaacttaacagggaggacctgctgcggaagcagcggacctttgacaacgggtctatcccccaccagattcatctgggcgaactgcacgcaatcctgaggaggcaggaggatttttatccttttcttaaagataaccgcgagaaaatagaaaagattcttacattcaggatcccgtactacgtgggacctctcgcccggggcaattcacggtttgcctggatgacaaggaagtcagaggagactattacaccttggaacttcgaagaagtggtggacaagggtgcatctgcccagtctttcatcgagcggatgacaaattttgacaagaacctccctaatgagaaggtgctgcccaaacattctctgctctacgagtactttaccgtctacaatgaactgactaaagtcaagtacgtcaccgagggaatgaggaagccggcattccttagtggagaacagaagaaggcgattgtagacctgttgttcaagaccaacaggaaggtgactgtgaagcaacttaaagaagactactttaagaagatcgaatgttttgacagtgtggaaatttcaggggttgaagaccgcttcaatgcgtcattggggacttaccatgatcttctcaagatcataaaggacaaagacttcctggacaacgaagaaaatgaggatattctcgaagacatcgtcctcaccctgaccctgttcgaagacagggaaatgatagaagagcgcttgaaaacctatgcccacctcttcgacgataaagttatgaagcagctgaagcgcaggagatacacaggatggggaagattgtcaaggaagctgatcaatggaattagggataaacagagtggcaagaccatactggatttcctcaaatctgatggcttcgccaataggaacttcatgcaactgattcacgatgactctcttaccttcaaggaggacattcaaaaggctcaggtgagcgggcagggagactcccttcatgaacacatcgcgaatttggcaggttcccccgctattaaaaagggcatccttcaaactgtcaaggtggtggatgaattggtcaaggtaatgggcagacataagccagaaaatattgtgatcgagatggcccgcgaaaaccagaccacacagaagggccagaaaaatagtagagagcggatgaagaggatcgaggagggcatcaaagagctgggatctcagattctcaaagaacaccccgtagaaaacacacagctgcagaacgaaaaattgtacttgtactatctgcagaacggcagagacatgtacgtcgaccaagaacttgatattaatagactgtccgactatgacgtagaccatatcgtgccccagtccttcctgaaggacgactccattgataacaaagtcttgacaagaagcgacaagaacaggggtaaaagtgataatgtgcctagcgaggaggtggtgaaaaaaatgaagaactactggcgacagctgcttaatgcaaagctcattacacaacggaagttcgataatctgacgaaagcagagagaggtggcttgtctgagttggacaaggcagggtttattaagcggcagctggtggaaactaggcagatcacaaagcacgtggcgcagattttggacagccggatgaacacaaaatacgacgaaaatgataaactgatacgagaggtcaaagttatcacgctgaaaagcaagctggtgtccgattttcggaaagacttccagttctacaaagttcgcgagattaataactaccatcatgctcacgatgcgtacctgaacgctgttgtcgggaccgccttgataaagaagtacccaaagctggaatccgagttcgtatacggggattacaaagtgtacgatgtgaggaaaatgatagccaagtccgagcaggagattggaaaggccacagctaagtacttcttttattctaacatcatgaatttttttaagacggaaattaccctggccaacggagagatcagaaagcggccccttatagagacaaatggtgaaacaggtgaaatcgtctgggataagggcagggatttcgctactgtgaggaaggtgctgagtatgccacaggtaaatatcgtgaaaaaaaccgaagtacagaccggaggattttccaaggaaagcattttgcctaaaagaaactcagacaagctcatcgcccgcaagaaagattgggaccctaagaaatacgggggatttgactcacccaccgtagcctattctgtgctggtggtagctaaggtggaaaaaggaaagtctaagaagctgaagtccgtgaaggaactcttgggaatcactatcatggaaagatcatcctttgaaaagaaccctatcgatttcctggaggctaagggttacaaggaggtcaagaaagacctcatcattaaactgccaaaatactctctcttcgagctggaaaatggcaggaagagaatgttggccagcgccggagagctgcaaaagggaaacgagcttgctctgccctccaaatatgttaattttctctatctcgcttcccactatgaaaagctgaaagggtctcccgaagataacgagcagaagcagctgttcgtcgaacagcacaagcactatctggatgaaataatcgaacaaataagcgagttcagcaaaagggttatcctggcggatgctaatttggacaaagtactgtctgcttataacaagcaccgggataagcctattagggaacaagccgagaatataattcacctctttacactcacgaatctcggagcccccgccgccttcaaatactttgatacgactatcgaccggaaacggtataccagtaccaaagaggtcctcgatgccaccctcatccaccagtcaattactggcctgtacgaaacacggatcgacctctctcaactgggcggcgactag

SEQ ID NO: 130 - protein, 1368 aa, Streptococcus pyogenes [sequence omitted]

SEQ ID NO: 131 - DNA, 3249 bp, Neisseria meningitidis
  source 1..3249: mol_type = unassigned DNA
atggccgccttcaagcccaaccccatcaactacatcctgggcctggacatcggcatcgccagcgtgggctgggccatggtggagatcgacgaggacgagaaccccatctgcctgatcgacctgggtgtgcgcgtgttcgagcgcgctgaggtgcccaagactggtgacagtctggctatggctcgccggcttgctcgctctgttcggcgccttactcgccggcgcgctcaccgccttctgcgcgctcgccgcctgctgaagcgcgagggtgtgctgcaggctgccgacttcgacgagaacggcctgatcaagagcctgcccaacactccttggcagctgcgcgctgccgctctggaccgcaagctgactcctctggagtggagcgccgtgctgctgcacctgatcaagcaccgcggctacctgagccagcgcaagaacgagggcgagaccgccgacaaggagctgggtgctctgctgaagggcgtggccgacaacgcccacgccctgcagactggtgacttccgcactcctgctgagctggccctgaacaagttcgagaaggagagcggccacatccgcaaccagcgcggcgactacagccacaccttcagccgcaaggacctgcaggccgagctgatcctgctgttcgagaagcagaaggagttcggcaacccccacgtgagcggcggcctgaaggagggcatcgagaccctgctgatgacccagcgccccgccctgagcggcgacgccgtgcagaagatgctgggccactgcaccttcgagccagccgagcccaaggccgccaagaacacctacaccgccgagcgcttcatctggctgaccaagctgaacaacctgcgcatcctggagcagggcagcgagcgccccctgaccgacaccgagcgcgccaccctgatggacgagccctaccgcaagagcaagctgacctacgcccaggcccgcaagctgctgggtctggaggacaccgccttcttcaagggcctgcgctacggcaaggacaacgccgaggccagcaccctgatggagatgaaggcctaccacgccatcagccgcgccctggagaaggagggcctgaaggacaagaagagtcctctgaacctgagccccgagctgcaggacgagatcggcaccgccttcagcctgttcaagaccgacgaggacatcaccggccgcctgaaggaccgcatccagcccgagatcctggaggccctgctgaagcacatcagcttcgacaagttcgtgcagatcagcctgaaggccctgcgccgcatcgtgcccctgatggagcagggcaagcgctacgacgaggcctgcgccgagatctacggcgaccactacggcaagaagaacaccgaggagaagatctacctgcctcctatccccgccgacgagatccgcaaccccgtggtgctgcgcgccctgagccaggcccgcaaggtgatcaacggcgtggtgcgccgctacggcagccccgcccgcatccacatcgagaccgcccgcgaggtgggcaagagcttcaaggaccgcaaggagatcgagaagcgccaggaggagaaccgcaaggaccgcgagaaggccgccgccaagttccgcgagtacttccccaacttcgtgggcgagcccaagagcaaggacatcctgaagctgcgcctgtacgagcagcagcacggcaagtgcctgtacagcggcaaggagatcaacctgggccgcctgaacgagaagggctacgtggagatcgaccacgccctgcccttcagccgcacctgggacgacagcttcaacaacaaggtgctggtgctgggcagcgagaaccagaacaagggcaaccagaccccctacgagtacttcaacggcaaggacaacagccgcgagtggcaggagttcaaggcccgcgtggagaccagccgcttcccccgcagcaagaagcagcgcatcctgctgcagaagttcgacgaggacggcttcaaggagcgcaacctgaacgacacccgctacgtgaaccgcttcctgtgccagttcgtggccgaccgcatgcgcctgaccggcaagggcaagaagcgcgtgttcgccagcaacggccagatcaccaacctgctgcgcggcttctggggcctgcgcaaggtgcgcgccgagaacgaccgccaccacgccctggacgccgtggtggtggcctgcagcaccgtggccatgcagcagaagatcacccgcttcgtgcgctacaaggagatgaacgccttcgacggtaaaaccatcgacaaggagaccggcgaggtgctgcaccagaagacccacttcccccagccctgggagttcttcgcccaggaggtgatgatccgcgtgttcggcaagcccgacggcaagcccgagttcgaggaggccgacacccccgagaagctgcgcaccctgctggccgagaagctgagcagccgccctgaggccgtgcacgagtacgtgactcctctgttcgtgagccgcgcccccaaccgcaagatgagcggtcagggtcacatggagaccgtgaagagcgccaagcgcctggacgagggcgtgagcgtgctgcgcgtgcccctgacccagctgaagctgaaggacctggagaagatggtgaaccgcgagcgcgagcccaagctgtacgaggccctgaaggcccgcctggaggcccacaaggacgaccccgccaaggccttcgccgagcccttctacaagtacgacaaggccggcaaccgcacccagcaggtgaaggccgtgcgcgtggagcaggtgcagaagaccggcgtgtgggtgcgcaaccacaacggcatcgccgacaacgccaccatggtgcgcgtggacgtgttcgagaagggcgacaagtactacctggtgcccatctacagctggcaggtggccaagggcatcctgcccgaccgcgccgtggtgcagggcaaggacgaggaggactggcagctgatcgacgacagcttcaacttcaagttcagcctgcaccccaacgacctggtggaggtgatcaccaagaaggcccgcatgttcggctacttcgccagctgccaccgcggcaccggcaacatcaacatccgcatccacgacctggaccacaagatcggcaagaacggcatcctggagggcatcggcgtgaagaccgccctgagcttccagaagtaccagatcgacgagctgggcaaggagatccgcccctgccgcctgaagaagcgccctcctgtgcgctaa

SEQ ID NO: 132 - protein, 1082 aa, Neisseria meningitidis; identical to SEQ ID NO: 63

SEQ ID NO: 133 - protein, 1053 aa, Staphylococcus aureus; identical to SEQ ID NO: 6

SEQ ID NO: 134 - DNA, 3159 bp, Staphylococcus aureus
  source 1..3159: mol_type = unassigned DNA
atgaaaaggaactacattctggggctggacatcgggattacaagcgtggggtatgggattattgactatgaaacaagggacgtgatcgacgcaggcgtcagactgttcaaggaggccaacgtggaaaacaatgagggacggagaagcaagaggggagccaggcgcctgaaacgacggagaaggcacagaatccagagggtgaagaaactgctgttcgattacaacctgctgaccgaccattctgagctgagtggaattaatccttatgaagccagggtgaaaggcctgagtcagaagctgtcagaggaagagttttccgcagctctgctgcacctggctaagcgccgaggagtgcataacgtcaatgaggtggaagaggacaccggcaacgagctgtctacaaaggaacagatctcacgcaatagcaaagctctggaagagaagtatgtcgcagagctgcagctggaacggctgaagaaagatggcgaggtgagagggtcaattaataggttcaagacaagcgactacgtcaaagaagccaagcagctgctgaaagtgcagaaggcttaccaccagctggatcagagcttcatcgatacttatatcgacctgctggagactcggagaacctactatgagggaccaggagaagggagccccttcggatggaaagacatcaaggaatggtacgagatgctgatgggacattgcacctattttccagaagagctgagaagcgtcaagtacgcttataacgcagatctgtacaacgccctgaatgacctgaacaacctggtcatcaccagggatgaaaacgagaaactggaatactatgagaagttccagatcatcgaaaacgtgtttaagcagaagaaaaagcctacactgaaacagattgctaaggagatcctggtcaacgaagaggacatcaagggctaccgggtgacaagcactggaaaaccagagttcaccaatctgaaagtgtatcacgatattaaggacatcacagcacggaaagaaatcattgagaacgccgaactgctggatcagattgctaagatcctgactatctaccagagctccgaggacatccaggaagagctgactaacctgaacagcgagctgacccaggaagagatcgaacagattagtaatctgaaggggtacaccggaacacacaacctgtccctgaaagctatcaatctgattctggatgagctgtggcatacaaacgacaatcagattgcaatctttaaccggctgaagctggtcccaaaaaaggtggacctgagtcagcagaaagagatcccaaccacactggtggacgatttcattctgtcacccgtggtcaagcggagcttcatccagagcatcaaagtgatcaacgccatcatcaagaagtacggcctgcccaatgatatcattatcgagctggctagggagaagaacagcaaggacgcacagaagatgatcaatgagatgcagaaacgaaaccggcagaccaatgaacgcattgaagagattatccgaactaccgggaaagagaacgcaaagtacctgattgaaaaaatcaagctgcacgatatgcaggagggaaagtgtctgtattctctggaggccatccccctggaggacctgctgaacaatccattcaactacgaggtcgatcatattatccccagaagcgtgtccttcgacaattcctttaacaacaaggtgctggtcaagcaggaagagaactctaaaaagggcaataggactcctttccagtacctgtctagttcagattccaagatctcttacgaaacctttaaaaagcacattctgaatctggccaaaggaaagggccgcatcagcaagaccaaaaaggagtacctgctggaagagcgggacatcaacagattctccgtccagaaggattttattaaccggaatctggtggacacaagatacgctactcgcggcctgatgaatctgctgcgatcctatttccgggtgaacaatctggatgtgaaagtcaagtccatcaacggcgggttcacatcttttctgaggcgcaaatggaagtttaaaaaggagcgcaacaaagggtacaagcaccatgccgaagatgctctgattatcgcaaatgccgacttcatctttaaggagtggaaaaagctggacaaagccaagaaagtgatggagaaccagatgttcgaagagaagcaggccgaatctatgcccgaaatcgagacagaacaggagtacaaggagattttcatcactcctcaccagatcaagcatatcaaggatttcaaggactacaagtactctcaccgggtggataaaaagcccaacagagagctgatcaatgacaccctgtatagtacaagaaaagacgataaggggaataccctgattgtgaacaatctgaacggactgtacgacaaagataatgacaagctgaaaaagctgatcaacaaaagtcccgagaagctgctgatgtaccaccatgatcctcagacatatcagaaactgaagctgattatggagcagtacggcgacgagaagaacccactgtataagtactatgaagagactgggaactacctgaccaagtatagcaaaaaggataatggccccgtgatcaagaagatcaagtactatgggaacaagctgaatgcccatctggacatcacagacgattaccctaacagtcgcaacaaggtggtcaagctgtcactgaagccatacagattcgatgtctatctggacaacggcgtgtataaatttgtgactgtcaagaatctggatgtcatcaaaaaggagaactactatgaagtgaatagcaagtgctacgaagaggctaaaaagctgaaaaagattagcaaccaggcagagttcatcgcctccttttacaacaacgacctgattaagatcaatggcgaactgtatagggtcatcggggtgaacaatgatctgctgaaccgcattgaagtgaatatgattgacatcacttaccgagagtatctggaaaacatgaatgataagcgcccccctcgaattatcaaaacaattgcctctaagactcagagtatcaaaaagtactcaaccgacattctgggaaacctgtatgaggtgaagagcaaaaagcaccctcagattatcaaaaagggc

SEQ ID NO: 135 - protein, 12 aa, synthetic construct
  REGION 1..12: note = Synthetic
SGSETPGTSESA

SEQ ID NO: 136 - protein, 16 aa, synthetic construct
  REGION 1..16: note = Synthetic
SGSETPGTSESATPES

SEQ ID NO: 137 - protein, 21 aa, synthetic construct
  REGION 1..21: note = Synthetic
SGSETPGTSESATPEGGSGGS

SEQ ID NO: 138 - protein, 4 aa, synthetic construct
  REGION 1..4: note = Synthetic
GSGS

SEQ ID NO: 139 - protein, 4 aa, synthetic construct
  REGION 1..4: note = Synthetic
GGGS

SEQ ID NO: 140 - protein, 5 aa, synthetic construct
  REGION 1..5: note = Synthetic
GGGGS

SEQ ID NO: 141 - protein, 4 aa, synthetic construct
  REGION 1..4: note = Synthetic
GGSG

SEQ ID NO: 142 - protein, 6 aa, synthetic construct
  REGION 1..6: note = Synthetic
GSGSGS

SEQ ID NO: 143 - protein, 10 aa, synthetic construct
  REGION 1..10: note = Synthetic
GSGSGSGSGS

SEQ ID NO: 144 - protein, 8 aa, synthetic construct
  REGION 1..8: note = Synthetic
GGSGGGSG

SEQ ID NO: 145 - protein, 12 aa, synthetic construct
  REGION 1..12: note = Synthetic
GGSGGGSGGGSG

SEQ ID NO: 146 - protein, 15 aa, synthetic construct
  REGION 1..15: note = Synthetic
GGGGSGGGGSGGGGS

SEQ ID NO: 147 - protein, 6 aa, synthetic construct
  REGION 1..6: note = Synthetic
GGSGGS

SEQ ID NO: 148 - protein, 1014 aa, Homo sapiens
MAESSDKLYRVEYAKSGRASCKKCSESIPKDSLRMAIMVQSPMFDGKVPHWYHFSCFWKVGHSIRHPDVEVDGFSELRWDDQQKVKKTAEAGGVTGKGQDGIGSKAEKTLGDFAAEYAKSNRSTCKGCMEKIEKGQVRLSKKMVDPEKPQLGMIDRWYHPGCFVKNREELGFRPEYSASQLKGFSLLATEDKEALKKQLPGVKSEGKRKGDEVDGVDEVAKKKSKKEKDKDSKLEKALKAQNDLIWNIKDELKKVCSTNDLKELLIFNKQQVPSGESAILDRVADGMVFGALLPCEECSGQLVFKSDAYYCTGDVTAWTKCMVKTQTPNRKEWVTPKEFREISYLKKLKVKKQDRIFPPETSASVAATPPPSTASAPAAVNSSASADKPLSNMKILTLGKLSRNKDEVKAMIEKLGGKLTGTANKASLCISTKKEVEKMNKKMEEVKEANIRVVSEDFLQDVSASTKSLQELFLAHILSPWGAEVKAEPVEVVAPRGKSGAALSKKSKGQVKEEGINKSEKRMKLTLKGGAAVDPDSGLEHSAHVLEKGGKVFSATLGLVDIVKGTNSYYKLQLLEDDKENRYWIFRSWGRVGTVIGSNKLEQMPSKEDAIEHFMKLYEEKTGNAWHSKNFTKYPKKFYPLEIDYGQDEEAVKKLTVNPGTKSKLPKPVQDLIKMIFDVESMKKAMVEYEIDLQKMPLGKLSKRQIQAAYSILSEVQQAVSQGSSDSQILDLSNRFYTLIPHDFGMKKPPLLNNADSVQAKVEMLDNLLDIEVAYSLLRGGSDDSSKDPIDVNYEKLKTDIKVVDRDSEEAEIIRKYVKNTHATTHNAYDLEVIDIFKIEREGECQRYKPFKQLHNRRLLWHGSRTTNFAGILSQGLRIAPPEAPVTGYMFGKGIYFADMVSKSANYCHTSQGDPIGLILLGEVALGNMYELKHASHISKLPKGKHSVKGLGKTTPDPSANISLDGVDVPLGTGISSGVNDTSLLYNEYIVYDIAQVNLKYLLKLKFNFKTSLW

SEQ ID NO: 149 - protein, 583 aa, Homo sapiens
MAARRRRSTGGGRARALNESKRVNNGNTAPEDSSPAKKTRRCQRQESKKMPVAGGKANKDRTEDKQDGMPGRSWASKRVSESVKALLLKGKAPVDPECTAKVGKAHVYCEGNDVYDVMLNQTNLQFNNNKYYLIQLLEDDAQRNFSVWMRWGRVGKMGQHSLVACSGNLNKAKEIFQKKFLDKTKNNWEDREKFEKVPGKYDMLQMDYATNTQDEEETKKEESLKSPLKPESQLDLRVQELIKLICNVQAMEEMMMEMKYNTKKAPLGKLTVAQIKAGYQSLKKIEDCIRAGQHGRALMEACNEFYTRIPHDFGLRTPPLIRTQKELSEKIQLLEALGDIEIAIKLVKTELQSPEHPLDQHYRNLHCALRPLDHESYEFKVISQYLQSTHAPTHSDYTMTLLDLFEVEKDGEKEAFREDLHNRMLLWHGSRMSNWVGILSHGLRIAPPEAPITGYMFGKGIYFADMSSKSANYCFASRLKNTGLLLLSEVALGQCNELLEANPKAEGLLQGKHSTKGLGKMAPSSAHFVTLNGSTVPLGPASDTGILNPDGYTLNYNEYIVYNPNQVRMRYLLKVQFNFLQLW

SEQ ID NO: 150 - protein, 570 aa, Homo sapiens
MAARRRRSTGGGRARALNESKRVNNGNTAPEDSSPAKKTRRCQRQESKKMPVAGGKANKDRTEDKQDESVKALLLKGKAPVDPECTAKVGKAHVYCEGNDVYDVMLNQTNLQFNNNKYYLIQLLEDDAQRNFSVWMRWGRVGKMGQHSLVACSGNLNKAKEIFQKKFLDKTKNNWEDREKFEKVPGKYDMLQMDYATNTQDEEETKKEESLKSPLKPESQLDLRVQELIKLICNVQAMEEMMMEMKYNTKKAPLGKLTVAQIKAGYQSLKKIEDCIRAGQHGRALMEACNEFYTRIPHDFGLRTPPLIRTQKELSEKIQLLEALGDIEIAIKLVKTELQSPEHPLDQHYRNLHCALRPLDHESYEFKVISQYLQSTHAPTHSDYTMTLLDLFEVEKDGEKEAFREDLHNRMLLWHGSRMSNWVGILSHGLRIAPPEAPITGYMFGKGIYFADMSSKSANYCFASRLKNTGLLLLSEVALGQCNELLEANPKAEGLLQGKHSTKGLGKMAPSSAHFVTLNGSTVPLGPASDTGILNPDGYTLNYNEYIVYNPNQVRMRYLLKVQFNFLQLW

SEQ ID NO: 151 - protein, 680 aa, synthetic construct
  REGION 1..680: note = Synthetic
MSTADALDDENTFKILVATDIHLGFMEKDAVRGNDTFVTLDEILRLAQENEVDFILLGGDLFHENKPSRKTLHTCLELLRKYCMGDRPVQFEILSDQSVNFGFSKFPWVNYQDGNLNISIPVFSIHGNHDDPTGADALCALDILSCAGFVNHFGRSMSVEKIDISPVLLQKGSTKIALYGLGSIPDERLYRMFVNKKVTMLRPKEDENSWFNLFVIHQNRSKHGSTNFIPEQFLDDFIDLVIWGHEHECKIAPTKNEQQLFYISQPGSSVVTSLSPGEAVKKHVGLLRIKGRKMNMHKIPLHTVRQFFMEDIVLANHPDIFNPDNPKVTQAIQSFCLEKIEEMLENAERERLGNSHQPEKPLVRLRVDYSGGFEPFSVLRFSQKFVDRVANPKDIIHFFRHREQKEKTGEEINFGKLITKPSEGTTLRVEDLVKQYFQTAEKNVQLSLLTERGMGEAVQEFVDKEEKDAIEELVKYQLEKTQRFLKERHIDALEDKIDEEVRRFRETRQKNTNEEDDEVREAMTRARALRSQSEESASAFSADDLMSIDLAEQMANDSDDSISAATNKGRGRGRGRRGGRGQNSASRGGSQRGRAFKSTRQQPSRNVTTKNYSEVIEVDESDVEEDIFPTTSKTDQRWSSTSSSKIMSQSQVSKGVDFESSEDDDDDPFMNTSSLRRNRR

SEQ ID NO: 152 - protein, 708 aa, synthetic construct
  REGION 1..708: note = Synthetic
MSTADALDDENTFKILVATDIHLGFMEKDAVRGNDTFVTLDEILRLAQENEVDFILLGGDLFHENKPSRKTLHTCLELLRKYCMGDRPVQFEILSDQSVNFGFSKFPWVNYQDGNLNISIPVFSIHGNHDDPTGADALCALDILSCAGFVNHFGRSMSVEKIDISPVLLQKGSTKIALYGLGSIPDERLYRMFVNKKVTMLRPKEDENSWFNLFVIHQNRSKHGSTNFIPEQFLDDFIDLVIWGHEHECKIAPTKNEQQLFYISQPGSSVVTSLSPGEAVKKHVGLLRIKGRKMNMHKIPLHTVRQFFMEDIVLANHPDIFNPDNPKVTQAIQSFCLEKIEEMLENAERERLGNSHQPEKPLVRLRVDYSGGFEPFSVLRFSQKFVDRVANPKDIIHFFRHREQKEKTGEEINFGKLITKPSEGTTLRVEDLVKQYFQTAEKNVQLSLLTERGMGEAVQEFVDKEEKDAIEELVKYQLEKTQRFLKERHIDALEDKIDEEVRRFRETRQKNTNEEDDEVREAMTRARALRSQSEESASAFSADDLMSIDLAEQMANDSDDSISAATNKGRGRGRGRRGGRGQNSASRGGSQRGRADTGLETSTRSRNSKTAVSASRNMSIIDAFKSTRQQPSRNVTTKNYSEVIEVDESDVEEDIFPTTSKTDQRWSSTSSSKIMSQSQVSKGVDFESSEDDDDDPFMNTSSLRRNRR

SEQ ID NO: 153 - protein, 1312 aa, Homo sapiens
MSRIEKMSILGVRSFGIEDKDKQIITFFSPLTILVGPNGAGKTTIIECLKYICTGDFPPGTKGNTFVHDPKVAQETDVRAQIRLQFRDVNGELIAVQRSMVCTQKSKKTEFKTLEGVITRTKHGEKVSLSSKCAEIDREMISSLGVSKAVLNNVIFCHQEDSNWPLSEGKALKQKFDEIFSATRYIKALETLRQVRQTQGQKVKEYQMELKYLKQYKEKACEIRDQITSKEAQLTSSKEIVKSYENELDPLKNRLKEIEHNLSKIMKLDNEIKALDSRKKQMEKDNSELEEKMEKVFQGTDEQLNDLYHNHQRTVREKERKLVDCHRELEKLNKESRLLNQEKSELLVEQGRLQLQADRHQEHIRARDSLIQSLATQLELDGFERGPFSERQIKNFHKLVRERQEGEAKTANQLMNDFAEKETLKQKQIDEIRDKKTGLGRIIELKSEILSKKQNELKNVKYELQQLEGSSDRILELDQELIKAERELSKAEKNSNVETLKMEVISLQNEKADLDRTLRKLDQEMEQLNHHTTTRTQMEMLTKDKADKDEQIRKIKSRHSDELTSLLGYFPNKKQLEDWLHSKSKEINQTRDRLAKLNKELASSEQNKNHINNELKRKEEQLSSYEDKLFDVCGSQDFESDLDRLKEEIEKSSKQRAMLAGATAVYSQFITQLTDENQSCCPVCQRVFQTEAELQEVISDLQSKLRLAPDKLKSTESELKKKEKRRDEMLGLVPMRQSIIDLKEKEIPELRNKLQNVNRDIQRLKNDIEEQETLLGTIMPEEESAKVCLTDVTIMERFQMELKDVERKIAQQAAKLQGIDLDRTVQQVNQEKQEKQHKLDTVSSKIELNRKLIQDQQEQIQHLKSTTNELKSEKLQISTNLQRRQQLEEQTVELSTEVQSLYREIKDAKEQVSPLETTLEKFQQEKEELINKKNTSNKIAQDKLNDIKEKVKNIHGYMKDIENYIQDGKDDYKKQKETELNKVIAQLSECEKHKEKINEDMRLMRQDIDTQKIQERWLQDNLTLRKRNEELKEVEEERKQHLKEMGQMQVLQMKSEHQKLEENIDNIKRNHNLALGRQKGYEEEIIHFKKELREPQFRDAEEKYREMMIVMRTTELVNKDLDIYYKTLDQAIMKFHSMKMEEINKIIRDLWRSTYRGQDIEYIEIRSDADENVSASDKRRNYNYRVVMLKGDTALDMRGRCSAGQKVLASLIIRLALAETFCLNCGIIALDEPTTNLDRENIESLAHALVEIIKSRSQQRNFQLLVITHDEDFVELLGRSEYVEKFYRIKKNIDQCSEIVKCSVSSLGFNVH

SEQ ID NO: 154 - protein, 754 aa, Homo sapiens
MWKLLPAAGPAGGEPYRLLTGVEYVVGRKNCAILIENDQSISRNHAVLTANFSVTNLSQTDEIPVLTLKDNSKYGTFVNEEKMQNGFSRTLKSGDGITFGVFGSKFRIEYEPLVACSSCLDVSGKTALNQAILQLGGFTVNNWTEECTHLVMVSVKVTIKTICALICGRPIVKPEYFTEFLKAVESKKQPPQIESFYPPLDEPSIGSKNVDLSGRQERKQIFKGKTFIFLNAKQHKKLSSAVVFGGGEARLITEENEEEHNFFLAPGTCVVDTGITNSQTLIPDCQKKWIQSIMDMLQRQGLRPIPEAEIGLAVIFMTTKNYCDPQGHPSTGLKTTTPGPSLSQGVSVDEKLMPSAPVNTTTYVADTESEQADTWDLSERPKEIKVSKMEQKFRMLSQDAPTVKESCKTSSNNNSMVSNTLAKMRIPNYQLSPTKLPSINKSKDRASQQQQTNSIRNYFQPSTKKRERDEENQEMSSCKSARIETSCSLLEQTQPATPSLWKNKEQHLSENEPVDTNSDNNLFTDTDLKSIVKNSASKSHAAEKLRSNKKREMDDVAIEDEVLEQLFKDTKPELEIDVKVQKQEEDVNVRKRPRMDIETNDTFSDEAVPESSKISQENEIGKKRELKEDSLWSAKEISNNDKLQDDSEMLPKKLLLTEFRSLVIKNSTSRNPSGINDDYGQLKNFKKFKKVTYPGAGKLPHIIGGSDLIAHHARKNTELEEWLRQEMEVQNQHAKEESLADDLFRYNPYLKRRR

SEQ ID NO: 155 - protein, 777 aa, Homo sapiens
MPDNRQPRNRQPRIRSGNEPRSAPAMEPDGRGAWAHSRAALDRLEKLLRCSRCTNILREPVCLGGCEHIFCSNCVSDCIGTGCPVCYTPAWIQDLKINRQLDSMIQLCSKLRNLLHDNELSDLKEDKPRKSLFNDAGNKKNSIKMWFSPRSKKVRYVVSKASVQTQPAIKKDASAQQDSYEFVSPSPPADVSERAKKASARSGKKQKKKTLAEINQKWNLEAEKEDGEFDSKEESKQKLVSFCSQPSVISSPQINGEIDLLASGSLTESECFGSLTEVSLPLAEQIESPDTKSRNEVVTPEKVCKNYLTSKKSLPLENNGKRGHHNRLSSPISKRCRTSILSTSGDFVKQTVPSENIPLPECSSPPSCKRKVGGTSGRKNSNMSDEFISLSPGTPPSTLSSSSYRRVMSSPSAMKLLPNMAVKRNHRGETLLHIASIKGDIPSVEYLLQNGSDPNVKDHAGWTPLHEACNHGHLKVVELLLQHKALVNTTGYQNDSPLHDAAKNGHVDIVKLLLSYGASRNAVNIFGLRPVDYTDDESMKSLLLLPEKNESSSASHCSVMNTGQRRDGPLVLIGSGLSSEQQKMLSELAVILKAKKYTEFDSTVTHVVVPGDAVQSTLKCMLGILNGCWILKFEWVKACLRRKVCEQEEKYEIPEGPRRSRLNREQLLPKLFDGCYFYLWGTFKHHPKDNLIKLVTAGGGQILSRKPKPDSDVTQTINTVAYHARPDSDQRFCTQYIIYEDLCNYHPERVRQGKVWKAPSSWFIDCVMSFELLPLDS

SEQ ID NO: 156 - protein, 758 aa, Homo sapiens
MPDNRQPRNRQPRIRSGNEPRSAPAMEPDGRGAWAHSRAALDRLEKLLRCSRCNCVSDCIGTGCPVCYTPAWIQDLKINRQLDSMIQLCSKLRNLLHDNELSDLKEDKPRKSLFNDAGNKKNSIKMWFSPRSKKVRYVVSKASVQTQPAIKKDASAQQDSYEFVSPSPPADVSERAKKASARSGKKQKKKTLAEINQKWNLEAEKEDGEFDSKEESKQKLVSFCSQPSVISSPQINGEIDLLASGSLTESECFGSLTEVSLPLAEQIESPDTKSRNEVVTPEKVCKNYLTSKKSLPLENNGKRGHHNRLSSPISKRCRTSILSTSGDFVKQTVPSENIPLPECSSPPSCKRKVGGTSGRKNSNMSDEFISLSPGTPPSTLSSSSYRRVMSSPSAMKLLPNMAVKRNHRGETLLHIASIKGDIPSVEYLLQNGSDPNVKDHAGWTPLHEACNHGHLKVVELLLQHKALVNTTGYQNDSPLHDAAKNGHVDIVKLLLSYGASRNAVNIFGLRPVDYTDDESMKSLLLLPEKNESSSASHCSVMNTGQRRDGPLVLIGSGLSSEQQKMLSELAVILKAKKYTEFDSTVTHVVVPGDAVQSTLKCMLGILNGCWILKFEWVKACLRRKVCEQEEKYEIPEGPRRSRLNREQLLPKLFDGCYFYLWGTFKHHPKDNLIKLVTAGGGQILSRKPKPDSDVTQTINTVAYHARPDSDQRFCTQYIIYEDLCNYHPERVRQGKVWKAPSSWFIDCVMSFELLPLDS

SEQ ID NO: 157 - protein, 326 aa, Homo sapiens
MPDNRQPRNRQPRIRSGNEPRSAPAMEPDGRGAWAHSRAALDRLEKLLRCSRCTNILREPVCLGGCEHIFCSNIFGLRPVDYTDDESMKSLLLLPEKNESSSASHCSVMNTGQRRDGPLVLIGSGLSSEQQKMLSELAVILKAKKYTEFDSTVTHVVVPGDAVQSTLKCMLGILNGCWILKFEWVKACLRRKVCEQEEKYEIPEGPRRSRLNREQLLPKLFDGCYFYLWGTFKHHPKDNLIKLVTAGGGQILSRKPKPDSDVTQTINTVAYHARPDSDQRFCTQYIIYEDLCNYHPERVRQGKVWKAPSSWFIDCVMSFELLPLDS

SEQ ID NO: 158 - protein, 307 aa, Homo sapiens
MPDNRQPRNRQPRIRSGNEPRSAPAMEPDGRGAWAHSRAALDRLEKLLRCSRCNIFGLRPVDYTDDESMKSLLLLPEKNESSSASHCSVMNTGQRRDGPLVLIGSGLSSEQQKMLSELAVILKAKKYTEFDSTVTHVVVPGDAVQSTLKCMLGILNGCWILKFEWVKACLRRKVCEQEEKYEIPEGPRRSRLNREQLLPKLFDGCYFYLWGTFKHHPKDNLIKLVTAGGGQILSRKPKPDSDVTQTINTVAYHARPDSDQRFCTQYIIYEDLCNYHPERVRQGKVWKAPSSWFIDCVMSFELLPLDS

SEQ ID NO: 159 - protein, 264 aa, Homo sapiens
MPDNRQPRNRQPRIRSGNEPRSAPAMEPDGRGAWAHSRAALDRLEKLLRCSRCTNILREPVCLGGCEHIFCSNCVSDCIGTGCPVCYTPAWIQDLKINRQLDSMIQLCSKLRNLLHDNELSGVKACLRRKVCEQEEKYEIPEGPRRSRLNREQLLPKLFDGCYFYLWGTFKHHPKDNLIKLVTAGGGQILSRKPKPDSDVTQTINTVAYHARPDSDQRFCTQYIIYEDLCNYHPERVRQGKVWKAPSSWFIDCVMSFELLPLDS

SEQ ID NO: 160 - protein, 3418 aa, Homo sapiens [sequence omitted]

SEQ ID NO: 161 - protein, 1863 aa, Homo sapiens
MDLSALRVEEVQNVINAMQKILECPICLELIKEPVSTKCDHIFCKFCMLKLLNQKKGPSQCPLCKNDITKRSLQESTRFSQLVEELLKIICAFQLDTGLEYANSYNFAKKENNSPEHLKDEVSIIQSMGYRNRAKRLLQSEPENPSLQETSLSVQLSNLGTVRTLRTKQRIQPQKTSVYIELGSDSSEDTVNKATYCSVGDQELLQITPQGTRDEISLDSAKKAACEFSETDVTNTEHHQPSNNDLNTTEKRAAERHPEKYQGSSVSNLHVEPCGTNTHASSLQHENSSLLLTKDRMNVEKAEFCNKSKQPGLARSQHNRWAGSKETCNDRRTPSTEKKVDLNADPLCERKEWNKQKLPCSENPRDTEDVPWITLNSSIQKVNEWFSRSDELLGSDDSHDGESESNAKVADVLDVLNEVDEYSGSSEKIDLLASDPHEALICKSERVHSKSVESNIEDKIFGKTYRKKASLPNLSHVTENLIIGAFVTEPQIIQERPLTNKLKRKRRPTSGLHPEDFIKKADLAVQKTPEMINQGTNQTEQNGQVMNITNSGHENKTKGDSIQNEKNPNPIESLEKESAFKTKAEPISSSISNMELELNIHNSKAPKKNRLRRKSSTRHIHALELVVSRNLSPPNCTELQIDSCSSSEEIKKKKYNQMPVRHSRNLQLMEGKEPATGAKKSNKPNEQTSKRHDSDTFPELKLTNAPGSFTKCSNTSELKEFVNPSLPREEKEEKLETVKVSNNAEDPKDLMLSGERVLQTERSVESSSISLVPGTDYGTQESISLLEVSTLGKAKTEPNKCVSQCAAFENPKGLIHGCSKDNRNDTEGFKYPLGHEVNHSRETSIEMEESELDAQYLQNTFKVSKRQSFAPFSNPGNAEEECATFSAHSGSLKKQSPKVTFECEQKEENQGKNESNIKPVQTVNITAGFPVVGQKDKPVDNAKCSIKGGSRFCLSSQFRGNETGLITPNKHGLLQNPYRIPPLFPIKSFVKTKCKKNLLEENFEEHSMSPEREMGNENIPSTVSTISRNNIRENVFKEASSSNINEVGSSTNEVGSSINEIGSSDENIQAELGRNRGPKLNAMLRLGVLQPEVYKQSLPGSNCKHPEIKKQEYEEVVQTVNTDFSPYLISDNLEQPMGSSHASQVCSETPDDLLDDGEIKEDTSFAENDIKESSAVFSKSVQKGELSRSPSPFTHTHLAQGYRRGAKKLESSEENLSSEDEELPCFQHLLFGKVNNIPSQSTRHSTVATECLSKNTEENLLSLKNSLNDCSNQVILAKASQEHHLSEETKCSASLFSSQCSELEDLTANTNTQDPFLIGSSKQMRHQSESQGVGLSDKELVSDDEERGTGLEENNQEEQSMDSNLGEAASGCESETSVSEDCSGLSSQSDILTTQQRDTMQHNLIKLQQEMAELEAVLEQHGSQPSNSYPSIISDSSALEDLRNPEQSTSEKAVLTSQKSSEYPISQNPEGLSADKFEVSADSSTSKNKEPGVERSSPSKCPSLDDRWYMHSCSGSLQNRNYPSQEELIKVVDVEEQQLEESGPHDLTETSYLPRQDLEGTPYLESGISLFSDDPESDPSEDRAPESARVGNIPSSTSALKVPQLKVAESAQSPAAAHTTDTAGYNAMEESVSREKPELTASTERVNKRMSMVVSGLTPEEFMLVYKFARKHHITLTNLITEETTHVVMKTDAEFVCERTLKYFLGIAGGKWVVSYFWVTQSIKERKMLNEHDFEVRGDVVNGRNHQGPKRARESQDRKIFRGLEICCYGPFTNMPTDQLEWMVQLCGASVVKELSSFTLGTGVHPIVVVQPDAWTEDNGFHAIGQMCEAPVVTREWVLDSVALYQCQELDTYLIPQIPHSHY

SEQ ID NO: 162 - protein, 1816 aa, Homo sapiens
MLKLLNQKKGPSQCPLCKNDITKRSLQESTRFSQLVEELLKIICAFQLDTGLEYANSYNFAKKENNSPEHLKDEVSIIQSMGYRNRAKRLLQSEPENPSLQETSLSVQLSNLGTVRTLRTKQRIQPQKTSVYIELGSDSSEDTVNKATYCSVGDQELLQITPQGTRDEISLDSAKKAACEFSETDVTNTEHHQPSNNDLNTTEKRAAERHPEKYQGSSVSNLHVEPCGTNTHASSLQHENSSLLLTKDRMNVEKAEFCNKSKQPGLARSQHNRWAGSKETCNDRRTPSTEKKVDLNADPLCERKEWNKQKLPCSENPRDTEDVPWITLNSSIQKVNEWFSRSDELLGSDDSHDGESESNAKVADVLDVLNEVDEYSGSSEKIDLLASDPHEALICKSERVHSKSVESNIEDKIFGKTYRKKASLPNLSHVTENLIIGAFVTEPQIIQERPLTNKLKRKRRPTSGLHPEDFIKKADLAVQKTPEMINQGTNQTEQNGQVMNITNSGHENKTKGDSIQNEKNPNPIESLEKESAFKTKAEPISSSISNMELELNIHNSKAPKKNRLRRKSSTRHIHALELVVSRNLSPPNCTELQIDSCSSSEEIKKKKYNQMPVRHSRNLQLMEGKEPATGAKKSNKPNEQTSKRHDSDTFPELKLTNAPGSFTKCSNTSELKEFVNPSLPREEKEEKLETVKVSNNAEDPKDLMLSGERVLQTERSVESSSISLVPGTDYGTQESISLLEVSTLGKAKTEPNKCVSQCAAFENPKGLIHGCSKDNRNDTEGFKYPLGHEVNHSRETSIEMEESELDAQYLQNTFKVSKRQSFAPFSNPGNAEEECATFSAHSGSLKKQSPKVTFECEQKEENQGKNESNIKPVQTVNITAGFPVVGQKDKPVDNAKCSIKGGSRFCLSSQFRGNETGLITPNKHGLLQNPYRIPPLFPIKSFVKTKCKKNLLEENFEEHSMSPEREMGNENIPSTVSTISRNNIRENVFKEASSSNINEVGSSTNEVGSSINEIGSSDENIQAELGRNRGPKLNAMLRLGVLQPEVYKQSLPGSNCKHPEIKKQEYEEVVQTVNTDFSPYLISDNLEQPMGSSHASQVCSETPDDLLDDGEIKEDTSFAENDIKESSAVFSKSVQKGELSRSPSPFTHTHLAQGYRRGAKKLESSEENLSSEDEELPCFQHLLFGKVNNIPSQSTRHSTVATECLSKNTEENLLSLKNSLNDCSNQVILAKASQEHHLSEETKCSASLFSSQCSELEDLTANTNTQDPFLIGSSKQMRHQSESQGVGLSDKELVSDDEERGTGLEENNQEEQSMDSNLGEAASGCESETSVSEDCSGLSSQSDILTTQQRDTMQHNLIKLQQEMAELEAVLEQHGSQPSNSYPSIISDSSALEDLRNPEQSTSEKAVLTSQKSSEYPISQNPEGLSADKFEVSADSSTSKNKEPGVERSSPSKCPSLDDRWYMHSCSGSLQNRNYPSQEELIKVVDVEEQQLEESGPHDLTETSYLPRQDLEGTPYLESGISLFSDDPESDPSEDRAPESARVGNIPSSTSALKVPQLKVAESAQSPAAAHTTDTAGYNAMEESVSREKPELTASTERVNKRMSMVVSGLTPEEFMLVYKFARKHHITLTNLITEETTHVVMKTDAEFVCERTLKYFLGIAGGKWVVSYFWVTQSIKERKMLNEHDFEVRGDVVNGRNHQGPKRARESQDRKIFRGLEICCYGPFTNMPTDQLEWMVQLCGASVVKELSSFTLGTGVHPIVVVQPDAWTEDNGFHAIGQMCEAPVVTREWVLDSVALYQCQELDTYLIPQIPHSHY

SEQ ID NO: 163 - protein, 1884 aa, Homo sapiens
MDLSALRVEEVQNVINAMQKILECPICLELIKEPVSTKCDHIFCKFCMLKLLNQKKGPSQCPLCKNDITKRSLQESTRFSQLVEELLKIICAFQLDTGLEYANSYNFAKKENNSPEHLKDEVSIIQSMGYRNRAKRLLQSEPENPSLQETSLSVQLSNLGTVRTLRTKQRIQPQKTSVYIELGSDSSEDTVNKATYCSVGDQELLQITPQGTRDEISLDSAKKAACEFSETDVTNTEHHQPSNNDLNTTEKRAAERHPEKYQGSSVSNLHVEPCGTNTHASSLQHENSSLLLTKDRMNVEKAEFCNKSKQPGLARSQHNRWAGSKETCNDRRTPSTEKKVDLNADPLCERKEWNKQKLPCSENPRDTEDVPWITLNSSIQKVNEWFSRSDELLGSDDSHDGESESNAKVADVLDVLNEVDEYSGSSEKIDLLASDPHEALICKSERVHSKSVESNIEDKIFGKTYRKKASLPNLSHVTENLIIGAFVTEPQIIQERPLTNKLKRKRRPTSGLHPEDFIKKADLAVQKTPEMINQGTNQTEQNGQVMNITNSGHENKTKGDSIQNEKNPNPIESLEKESAFKTKAEPISSSISNMELELNIHNSKAPKKNRLRRKSSTRHIHALELVVSRNLSPPNCTELQIDSCSSSEEIKKKKYNQMPVRHSRNLQLMEGKEPATGAKKSNKPNEQTSKRHDSDTFPELKLTNAPGSFTKCSNTSELKEFVNPSLPREEKEEKLETVKVSNNAEDPKDLMLSGERVLQTERSVESSSISLVPGTDYGTQESISLLEVSTLGKAKTEPNKCVSQCAAFENPKGLIHGCSKDNRNDTEGFKYPLGHEVNHSRETSIEMEESELDAQYLQNTFKVSKRQSFAPFSNPGNAEEECATFSAHSGSLKKQSPKVTFECEQKEENQGKNESNIKPVQTVNITAGFPVVGQKDKPVDNAKCSIKGGSRFCLSSQFRGNETGLITPNKHGLLQNPYRIPPLFPIKSFVKTKCKKNLLEENFEEHSMSPEREMGNENIPSTVSTISRNNIRENVFKEASSSNINEVGSSTNEVGSSINEIGSSDENIQAELGRNRGPKLNAMLRLGVLQPEVYKQSLPGSNCKHPEIKKQEYEEVVQTVNTDFSPYLISDNLEQPMGSSHASQVCSETPDDLLDDGEIKEDTSFAENDIKESSAVFSKSVQKGELSRSPSPFTHTHLAQGYRRGAKKLESSEENLSSEDEELPCFQHLLFGKVNNIPSQSTRHSTVATECLSKNTEENLLSLKNSLNDCSNQVILAKASQEHHLSEETKCSASLFSSQCSELEDLTANTNTQDPFLIGSSKQMRHQSESQGVGLSDKELVSDDEERGTGLEENNQEEQSMDSNLGEAASGCESETSVSEDCSGLSSQSDILTTQQRDTMQHNLIKLQQEMAELEAVLEQHGSQPSNSYPSIISDSSALEDLRNPEQSTSEKDSHIHGQRNNSMFSKRPREHISVLTSQKSSEYPISQNPEGLSADKFEVSADSSTSKNKEPGVERSSPSKCPSLDDRWYMHSCSGSLQNRNYPSQEELIKVVDVEEQQLEESGPHDLTETSYLPRQDLEGTPYLESGISLFSDDPESDPSEDRAPESARVGNIPSSTSALKVPQLKVAESAQSPAAAHTTDTAGYNAMEESVSREKPELTASTERVNKRMSMVVSGLTPEEFMLVYKFARKHHITLTNLITEETTHVVMKTDAEFVCERTLKYFLGIAGGKWVVSYFWVTQSIKERKMLNEHDFEVRGDVVNGRNHQGPKRARESQDRKIFRGLEICCYGPFTNMPTDQLEWMVQLCGASVVKELSSFTLGTGVHPIVVVQPDAWTEDNGFHAIGQMCEAPVVTREWVLDSVALYQCQELDTYLIPQIPHSHY

SEQ ID NO: 164 - protein, 759 aa, Homo sapiens
MDLSALRVEEVQNVINAMQKILECPICLELIKEPVSTKCDHIFCKFCMLKLLNQKKGPSQCPLCKNDITKRSLQESTRFSQLVEELLKIICAFQLDTGLEYANSYNFAKKENNSPEHLKDEVSIIQSMGYRNRAKRLLQSEPENPSLQETSLSVQLSNLGTVRTLRTKQRIQPQKTSVYIELGSDSSEDTVNKATYCSVGDQELLQITPQGTRDEISLDSAKKAACEFSETDVTNTEHHQPSNNDLNTTEKRAAERHPEKYQGEAASGCESETSVSEDCSGLSSQSDILTTQQRDTMQHNLIKLQQEMAELEAVLEQHGSQPSNSYPSIISDSSALEDLRNPEQSTSEKVLTSQKSSEYPISQNPEGLSADKFEVSADSSTSKNKEPGVERSSPSKCPSLDDRWYMHSCSGSLQNRNYPSQEELIKVVDVEEQQLEESGPHDLTETSYLPRQDLEGTPYLESGISLFSDDPESDPSEDRAPESARVGNIPSSTSALKVPQLKVAESAQSPAAAHTTDTAGYNAMEESVSREKPELTASTERVNKRMSMVVSGLTPEEFMLVYKFARKHHITLTNLITEETTHVVMKTDAEFVCERTLKYFLGIAGGKWVVSYFWVTQSIKERKMLNEHDFEVRGDVVNGRNHQGPKRARESQDRKIFRGLEICCYGPFTNMPTDQLEWMVQLCGASVVKELSSFTLGTGVHPIVVVQPDAWTEDNGFHAIGQMCEAPVVTREWVLDSVALYQCQELDTYLIPQIPHSHY

SEQ ID NO: 165 - protein, 699 aa, Homo sapiens
MDLSALRVEEVQNVINAMQKILECPICLELIKEPVSTKCDHIFCKFCMLKLLNQKKGPSQCPLCKNDITKRSLQESTRFSQLVEELLKIICAFQLDTGLEYANSYNFAKKENNSPEHLKDEVSIIQSMGYRNRAKRLLQSEPENPSLQETSLSVQLSNLGTVRTLRTKQRIQPQKTSVYIELGSDSSEDTVNKATYCSVGDQELLQITPQGTRDEISLDSAKKAACEFSETDVTNTEHHQPSNNDLNTTEKRAAERHPEKYQGEAASGCESETSVSEDCSGLSSQSDILTTQQRDTMQHNLIKLQQEMAELEAVLEQHGSQPSNSYPSIISDSSALEDLRNPEQSTSEKVLTSQKSSEYPISQNPEGLSADKFEVSADSSTSKNKEPGVERSSPSKCPSLDDRWYMHSCSGSLQNRNYPSQEELIKVVDVEEQQLEESGPHDLTETSYLPRQDLEGTPYLESGISLFSDDPESDPSEDRAPESARVGNIPSSTSALKVPQLKVAESAQSPAAAHTTDTAGYNAMEESVSREKPELTASTERVNKRMSMVVSGLTPEEFMLVYKFARKHHITLTNLITEETTHVVMKTDAEFVCERTLKYFLGIAGGKWVVSYFWVTQSIKERKMLNEHDFEVRGDVVNGRNHQGPKRARESQDRKIFRGLEICCYGPFTNMPTGCPPNCGCAARCLDRGQWLPCNWADV

SEQ ID NO: 166 - protein, 897 aa, synthetic construct
  REGION 1..897: note = Synthetic
MNISGSSCGSPNSADTSSDFKDLWTKLKECHDREVQGLQVKVTKLKQERILDAQRLEEFFTKNQQLREQQKVLHETIKVLEDRLRAGLCDRCAVTEEHMRKKQQEFENIRQQNLKLITELMNERNTLQEENKKLSEQLQQKIENDQQHQAAELECEEDVIPDSPITAFSFSGVNRLRRKENPHVRYIEQTHTKLEHSVCANEMRKVSKSSTHPQHNPNENEILVADTYDQSQSPMAKAHGTSSYTPDKSSFNLATVVAETLGLGVQEESETQGPMSPLGDELYHCLEGNHKKQPFEESTRNTEDSLRFSDSTSKTPPQEELPTRVSSPVFGATSSIKSGLDLNTSLSPSLLQPGKKKHLKTLPFSNTCISRLEKTRSKSEDSALFTHHSLGSEVNKIIIQSSNKQILINKNISESLGEQNRTEYGKDSNTDKHLEPLKSLGGRTSKRKKTEEESEHEVSCPQASFDKENAFPFPMDNQFSMNGDCVMDKPLDLSDRFSAIQRQEKSQGSETSKNKFRQVTLYEALKTIPKGFSSSRKASDGNCTLPKDSPGEPCSQECIILQPLNKCSPDNKPSLQIKEENAVFKIPLRPRESLETENVLDDIKSAGSHEPIKIQTRSDHGGCELASVLQLNPCRTGKIKSLQNNQDVSFENIQWSIDPGADLSQYKMDVTVIDTKDGSQSKLGGETVDMDCTLVSETVLLKMKKQEQKGEKSSNEERKMNDSLEDMFDRTTHEEYESCLADSFSQAADEEEELSTATKKLHTHGDKQDKVKQKAFVEPYFKGDERETSLQNFPHIEVVRKKEERRKLLGHTCKECEIYYADMPAEEREKKLASCSRHRFRYIPPNTPENFWEVGFPSTQTCMERGYIKEDLDPCPRPKRRQPYNAIFSPKGKEQKT

SEQ ID NO: 167 - protein, 867 aa, synthetic construct
  REGION 1..867: note = Synthetic
MNISGSSCGSPNSADTSSDFKDLWTKLKECHDREVQGLQVKVTKLKQERILDAQRLEEFFTKNQQLREQQKVLHETIKVLEDRLRAGLCDRCAVTEEHMRKKQQEFENIRQQNLKLITELMNERNTLQEENKKLSEQLQQKIENDQQHQAAELECEEDVIPDSPITAFSFSGVNRLRRKENPHVRYIEQTHTKLEHSVCANEMRKVSKSSTHPQHNPNENEILVADTYDQSQSPMAKAHGTSSYTPDKSSFNLATVVAETLGLGVQEESETQGPMSPLGDELYHCLEGNHKKQPFEESTRNTEDSLRFSDSTSKTPPQEELPTRVSSPVFGATSSIKSGLDLNTSLSPSLLQPGKKKHLKTLPFSNTCISRLEKTRSKSEDSALFTHHSLGSEVNKIIIQSSNKQILINKNISESLGEQNRTEYGKDSNTDKHLEPLKSLGGRTSKRKKTEEESEHEVSCPQASFDKENAFPFPMDNQFSMNGDCVMDKPLDLSDRFSAIQRQEKSQGSETSKNKFRQVTLYEALKTIPKGFSSSRKASDGNCTLPKDSPGEPCSQECIILQPLNKCSPDNKPSLQIKEENAVFKIPLRPRESLETENVLDDIKSAGSHEPIKIQTRSDHGGCELASVLQLNPCRTGKIKSLQNNQDVSFENIQWSIDPGADLSQYKMDVTVIDTKDGSQSKLGGETVDMDCTLVSETVLLKMKKQEQKGEKSSNEERKMNDSLEDMFDRTTHEEYESCLADSFSQAADEEEELSTATKKLHTHGDKQDKVKQKAFVEPYFKGDESIMQICQQKKEKRNWLPAQDTDSATFHPTHQRIFGKLVFLPLRLVWKEVILRKILILVLVQKDVSLTTQYFLQKARSRRHRR

SEQ ID NO: 168 - DNA, 2694 bp, synthetic construct
  misc_feature 1..2694: note = Synthetic
  source 1..2694: mol_type = other DNA
atgaacatcttgggaagcagctgtggaagccctaactctgcagatacatctagtgactttaaggacctttggacaaaactaaaagaatgtcatgatagagaagtacaaggtttacaagtaaaagtaaccaagctaaaacaggaacgaatcttagatgcacaaagactagaagaattcttcaccaaaaatcaacagctgagggaacagcagaaagtccttcatgaaaccattaaagttttagaagatcggttaagagcaggcttatgtgatcgctgtgcagtaactgaagaacatatgcggaaaaaacagcaagagtttgaaaatatccggcagcagaatcttaaacttattacagaacttatgaatgaaaggaatactctacaggaagaaaataaaaagctttctgaacaactccagcagaaaattgagaatgatcaacagcatcaagcagctgagcttgaatgtgaggaagacgttattccagattcaccgataacagccttctcattttctggcgttaaccggctacgaagaaaggagaacccccatgtccgatacatagaacaaacacatactaaattggagcactctgtgtgtgcaaatgaaatgagaaaagtttccaagtcttcaactcatccacaacataatcctaatgaaaatgaaattctagtagctgacacttatgaccaaagtcaatctccaatggccaaagcacatggaacaagcagctatacccctgataagtcatcttttaatttagctacagttgttgctgaaacacttggacttggtgttcaagaagaatctgaaactcaaggtcccatgagcccccttggtgatgagctctaccactgtctggaaggaaatcacaagaaacagccttttgaggaatctacaagaaatactgaagatagtttaagattttcagattctacttcaaagactcctcctcaagaagaattacctactcgagtgtcatctcctgtatttggagctacctctagtatcaaaagtggtttagatttgaatacaagtttgtccccttctcttttacagcctgggaaaaaaaaacatctgaaaacactcccttttagcaacacttgtatatctagattagaaaaaactagatcaaaatctgaagatagtgcccttttcacacatcacagtcttgggtctgaagtgaacaagatcattatccagtcatctaataaacagatacttataaataaaaatataagtgaatccctaggtgaacagaataggactgagtacggtaaagattctaacactgataaacatttggagcccctgaaatcattgggaggccgaacatccaaaaggaagaaaactgaggaagaaagtgaacatgaagtaagctgcccccaagcttcttttgataaagaaaatgctttcccttttccaatggataatcagttttccatgaatggagactgtgtgatggataaacctctggatctgtctgatcgattttcagctattcagcgtcaagagaaaagccaaggaagtgagacttctaaaaacaaatttaggcaagtgactctttatgaggctttgaagaccattccaaagggcttttcctcaagccgtaaggcctcagatggcaactgcacgttgcccaaagattccccaggggagccctgttcacaggaatgcatcatccttcagcccttgaataaatgctctccagacaataaaccatcattacaaataaaagaagaaaatgctgtctttaaaattcctctacgtccacgtgaaagtttggagactgagaatgttttagatgacataaagagtgctggttctcatgagccaataaaaatacaaaccaggtcagaccatggaggatgtgaacttgcatcagttcttcagttaaatccatgtagaactggtaaaataaagtctctacaaaacaaccaagatgtatcctttgaaaatatccagtggagtatagatccgggagcagacctttctcagtataaaatggatgttactgtaatagatacaaaggatggcagtcagtcaaaattaggaggagagacagtggacatggactgtacattggttagtgaaaccgttctcttaaaaatgaagaagcaagagcagaagggagaaaaaagttcaaatgaagaaagaaaaatgaatgatagcttggaagatatgtttgatcggacaacacatgaagagtatgaatcctgtttggcagacagtttctcccaagcagcagatgaagaggaggaattgtctactgccacaaagaaactacacactcatggtgataaacaagacaaagtcaagcagaaagcgtttgtggagccgtattttaaaggtgatgaaagagagactagcttgcaaaattttcctcatattgaggtggttcggaaaaaagaggagagaagaaaactgcttgggcacacgtgtaaggaatgtgaaatttattatgcagatatgccagcagaagaaagagaaaagaaattggcttcctgctcaagacaccgattccgctacattccacccaacacaccagagaatttttgggaagttggttttccttccactcagacttgtatggaaagaggttatattaaggaagatcttgatccttgtcctcgtccaaaaagacgtcagccttacaacgcaatattttctccaaaaggcaaggagcagaagacataa

SEQ ID NO: 169 - protein, 911 aa, synthetic construct
  REGION 1..911: note = Synthetic
MNILGSSCGSPNSADTSSDFKDLWTKLKECHDREVQGLQVKVTKLKQERILDAQRLEEFFTKNQQLREQQKVLHETIKVLEDRLRAGLCDRCAVTEEHMRKKQQEFENIRQQNLKLITELMNERNTLQEENKKLSEQLQQKIENDQQHQAAELECEEDVIPDSPITAFSFSGVNRLRRKENPHVRYIEQTHTKLEHSVCANEMRKVSKSSTHPQHNPNENEILVADTYDQSQSPMAKAHGTSSYTPDKSSFNLATVVAETLGLGVQEESETQGPMSPLGDELYHCLEGNHKKQPFEESTRNTEDSLRFSDSTSKTPPQEELPTRVSSPVFGATSSIKSGLDLNTSLSPSLLQPGKKKHLKTLPFSNTCISRLEKTRSKSEDSALFTHHSLGSEVNKIIIQSSNKQILINKNISESLGEQNRTEYGKDSNTDKHLEPLKSLGGRTSKRKKTEEESEHEVSCPQASFDKENAFPFPMDNQFSMNGDCVMDKPLDLSDRFSAIQRQEKSQGSETSKNKFRQVTLYEALKTIPKGFSSSRKASDGNCTLPKDSPGEPCSQECIILQPLNKCSPDNKPSLQIKEENAVFKIPLRPRESLETENVLDDIKSAGSHEPIKIQTRSDHGGCELASVLQLNPCRTGKIKSLQNNQDVSFENIQWSIDPGADLSQYKMDVTVIDTKDGSQSKLGGETVDMDCTLVSETVLLKMKKQEQKGEKSSNEERKMNDSLEDMFDRTTHEEYESCLADSFSQAADEEEELSTATKKLHTHGDKQDKVKQKAFVEPYFKGDERETSLQNFPHIEVVRKKEERRKLLGHTCKECEIYYADMPAEEREKKLASCSRHRFRYIPPNTPENFWEVGFPSTQTCMERGYIKEDLDPCPRPKRRQPYNAIFSPKGKEQKTDYKDHDGDYKDHDI

SEQ ID NO: 170 - protein, 2694 aa, synthetic construct
  REGION 1..2694: note = Synthetic
ATGAACATCTTGGGAAGCAGCTGTGGAAGCCCTAACTCTGCAGATACATCTAGTGACTTTAAGGACCTTTGGACAAAACTAAAAGAATGTCATGATAGAGAAGTACAAGGTTTACAAGTAAAAGTAACCAAGCTAAAACAGGAACGAATCTTAGATGCACAAAGACTAGAAGAATTCTTCACCAAAAATCAACAGCTGAGGGAACAGCAGAAAGTCCTTCATGAAACCATTAAAGTTTTAGAAGATCGGTTAAGAGCAGGCTTATGTGATCGCTGTGCAGTAACTGAAGAACATATGCGGAAAAAACAGCAAGAGTTTGAAAATATCCGGCAGCAGAATCTTAAACTTATTACAGAACTTATGAATGAAAGGAATACTCTACAGGAAGAAAATAAAAAGCTTTCTGAACAACTCCAGCAGAAAATTGAGAATGATCAACAGCATCAAGCAGCTGAGCTTGAATGTGAGGAAGACGTTATTCCAGATTCACCGATAACAGCCTTCTCATTTTCTGGCGTTAACCGGCTACGAAGAAAGGAGAACCCCCATGTCCGATACATAGAACAAACACATACTAAATTGGAGCACTCTGTGTGTGCAAATGAAATGAGAAAAGTTTCCAAGTCTTCAACTCATCCACAACATAATCCTAATGAAAATGAAATTCTAGTAGCTGACACTTATGACCAAAGTCAATCTCCAATGGCCAAAGCACATGGAACAAGCAGCTATACCCCTGATAAGTCATCTTTTAATTTAGCTACAGTTGTTGCTGAAACACTTGGACTTGGTGTTCAAGAAGAATCTGAAACTCAAGGTCCCATGAGCCCCCTTGGTGATGAGCTCTACCACTGTCTGGAAGGAAATCACAAGAAACAGCCTTTTGAGGAATCTACAAGAAATACTGAAGATAGTTTAAGATTTTCAGATTCTACTTCAAAGACTCCTCCTCAAGAAGAATTACCTACTCGAGTGTCATCTCCTGTATTTGGAGCTACCTCTAGTATCAAAAGTGGTTTAGATTTGAATACAAGTTTGTCCCCTTCTCTTTTACAGCCTGGGAAAAAAAAACATCTGAAAACACTCCCTTTTAGCAACACTTGTATATCTAGATTAGAAAAAACTAGATCAAAATCTGAAGATAGTGCCCTTTTCACACATCACAGTCTTGGGTCTGAAGTGAACAAGATCATTATCCAGTCATCTAATAAACAGATACTTATAAATAAAAATATAAGTGAATCCCTAGGTGAACAGAATAGGACTGAGTACGGTAAAGATTCTAACACTGATAAACATTTGGAGCCCCTGAAATCATTGGGAGGCCGAACATCCAAAAGGAAGAAAACTGAGGAAGAAAGTGAACATGAAGTAAGCTGCCCCCAAGCTTCTTTTGATAAAGAAAATGCTTTCCCTTTTCCAATGGATAATCAGTTTTCCATGAATGGAGACTGTGTGATGGATAAACCTCTGGATCTGTCTGATCGATTTTCAGCTATTCAGCGTCAAGAGAAAAGCCAAGGAAGTGAGACTTCTAAAAACAAATTTAGGCAAGTGACTCTTTATGAGGCTTTGAAGACCATTCCAAAGGGCTTTTCCTCAAGCCGTAAGGCCTCAGATGGCAACTGCACGTTGCCCAAAGATTCCCCAGGGGAGCCCTGTTCACAGGAATGCATCATCCTTCAGCCCTTGAATAAATGCTCTCCAGACAATAAACCATCATTACAAATAAAAGAAGAAAATGCTGTCTTTAAAATTCCTCTACGTCCACGTGAAAGTTTGGAGACTGAGAATGTTTTAGATGACATAAAGAGTGCTGGTTCTCATGAGCCAATAAAAATACAAACCAGGTCAGACCATGGAGGATGTGAACTTGCATCAGTTCTTCAGTTAAATCCATGTAGAACTGGTAAAATAAAGTCTCTACAAAACAACCAAGATGTATCCTTTGAAAATATCCAGTGGAGTATAGATCCGGGAGCAGACCTTTCTCAGTATAAAATGGATGTTACTGTAATAGATACAAAGGATGGCAGTCAGTCAAAATTAGGAGGAGAGACAGTGGACATGGACTGTACATTGGTTAGTGAAACCGTTCTCTTAAAAATGAAGAAGCAAGAGCAGAAGGGAGAAAAAAGTTCAAATGAAGAAAGAAAAATGAATGATAGCTTGGAAGATATGTTTGATCGGACAACACATGAAGAGTATGAATCCTGTTTGGCAGACAGTTTCTCCCAAGCAGCAGATGAAGAGGAGGAATTGTCTACTGCCACAAAGAAACTACACACTCATGGTGATAAACAAGACAAAGTCAAGCAGAAAGCGTTTGTGGAGCCGTATTTTAAAGGTGATGAAAGAGAGACTAGCTTGCAAAATTTTCCTCATATTGAGGTGGTTCGGAAAAAAGAGGAGAGAAGAAAACTGCTTGGGCACACGTGTAAGGAATGTGAAATTTATTATGCAGATATGCCAGCAGAAGAAAGAGAAAAGAAATTGGCTTCCTGCTCAAGACACCGATTCCGCTACATTCCACCCAACGAACCAGAGAATTTTTGGGAAGTTGGTTTTCCTTCCACTCAGACTTGTATGGAAAGAGGTTATATTAAGGAAGATCTTGATCCTTGTCCTCGTCCAAAAAGACGTCAGCCTTACAACGCAATATTTTCTCCAAAAGGCAAGGAGCAGAAGACATAA

SEQ ID NO: 171 - protein, 911 aa, synthetic construct
  REGION 1..911: note = Synthetic
MNILGSSCGSPNSADTSSDFKDLWTKLKECHDREVQGLQVKVTKLKQERILDAQRLEEFFTKNQQLREQQKVLHETIKVLEDRLRAGLCDRCAVTEEHMRKKQQEFENIRQQNLKLITELMNERNTLQEENKKLSEQLQQKIENDQQHQAAELECEEDVIPDSPITAFSFSGVNRLRRKENPHVRYIEQTHTKLEHSVCANEMRKVSKSSTHPQHNPNENEILVADTYDQSQSPMAKAHGTSSYTPDKSSFNLATVVAETLGLGVQEESETQGPMSPLGDELYHCLEGNHKKQPFEESTRNTEDSLRFSDSTSKTPPQEELPTRVSSPVFGATSSIKSGLDLNTSLSPSLLQPGKKKHLKTLPFSNTCISRLEKTRSKSEDSALFTHHSLGSEVNKIIIQSSNKQILINKNISESLGEQNRTEYGKDSNTDKHLEPLKSLGGRTSKRKKTEEESEHEVSCPQASFDKENAFPFPMDNQFSMNGDCVMDKPLDLSDRFSAIQRQEKSQGSETSKNKFRQVTLYEALKTIPKGFSSSRKASDGNCTLPKDSPGEPCSQECIILQPLNKCSPDNKPSLQIKEENAVFKIPLRPRESLETENVLDDIKSAGSHEPIKIQTRSDHGGCELASVLQLNPCRTGKIKSLQNNQDVSFENIQWSIDPGADLSQYKMDVTVIDTKDGSQSKLGGETVDMDCTLVSETVLLKMKKQEQKGEKSSNEERKMNDSLEDMFDRTTHEEYESCLADSFSQAADEEEELSTATKKLHTHGDKQDKVKQKAFVEPYFKGDERETSLQNFPHIEVVRKKEERRKLLGHTCKECEIYYADMPAEEREKKLASCSRHRFRYIPPNEPENFWEVGFPSTQTCMERGYIKEDLDPCPRPKRRQPYNAIFSPKGKEQKTDYKDHDGDYKDHDI

SEQ ID NO: 172 - protein, 803 aa, synthetic construct
  REGION 1..803: note = Synthetic
MGIQGLLQFIKEASEPIHVRKYKGQVVAVDTYCWLHKGAIACAEKLAKGEPTDRYVGFCMKFVNMLLSHGIKPILVFDGCTLPSKKEVERSRRERRQANLLKGKQLLREGKVSEARECFTRSINITHAMAHKVIKAARSQGVDCLVAPYEADAQLAYLNKAGIVQAIITEDSDLLAFGCKKVILKMDQFGNGLEIDQARLGMCRQLGDVFTEEKFRYMCILSGCDYLSSLRGIGLAKACKVLRLANNPDIVKVIKKIGHYLKMNITVPEDYINGFIRANNTFLYQLVFDPIKRKLIPLNAYEDDVDPETLSYAGQYVDDSIALQIALGNKDINTFEQIDDYNPDTAMPAHSRSHSWDDKTCQKSANVSSIWHRNYSPRPESGTVSDAPQLKENPSTVGVERVISTKGLNLPRKSSIVKRPRSAELSEDDLLSQYSLSFTKKTKKNSSEGNKSLSFSEVFVPDLVNGPTNKKSVSTPPRTRNKFATFLQRKNEESGAVVVPGTRSRFFCSSDSTDCVSNKVSIQPLDETAVTDKENNLHESEYGDQEGKRLVDTDVARNSSDDIPNNHIPGDHIPDKATVFTDEESYSFESSKFTRTISPPTLGTLRSCFSWSGGLGDFSRTPSPSPSTALQQFRRKSDSPTSLPENNMSDVSQLKSEESSDDESHPLREEACSSQSQESGEFSLQSSNASKLSQCSSKDSDSEESDCNIKLLDSQSDQTSKLRLSHFSKKDTPLRNKVPGLYKSSSADSLSTTKIKPLGPARASGLSKKPASIQKRKHHNAENKPGLQIKLNELWKNFGFKKF

SEQ ID NO: 173 - protein, 846 aa, synthetic construct
  REGION 1..846: note = Synthetic
MGIQGLLQFIKEASEPIHVRKYKGQVVAVDTYCWLHKGAIACAEKLAKGEPTDRYVGFCMKFVNMLLSHGIKPILVFDGCTLPSKKEVERSRRERRQANLLKGKQLLREGKVSEARECFTRSINITHAMAHKVIKAARSQGVDCLVAPYEADAQLAYLNKAGIVQAIITEDSDLLAFGCKKVILKMDQFGNGLEIDQARLGMCRQLGDVFTEEKFRYMCILSGCDYLSSLRGIGLAKACKVLRLANNPDIVKVIKKIGHYLKMNITVPEDYINGFIRANNTFLYQLVFDPIKRKLIPLNAYEDDVDPETLSYAGQYVDDSIALQIALGNKDINTFEQIDDYNPDTAMPAHSRSHSWDDKTCQKSANVSSIWHRNYSPRPESGTVSDAPQLKENPSTVGVERVISTKGLNLPRKSSIVKRPRSAELSEDDLLSQYSLSFTKKTKKNSSEGNKSLSFSEVFVPDLVNGPTNKKSVSTPPRTRNKFATFLQRKNEESGAVVVPGTRSRFFCSSDSTDCVSNKVSIQPLDETAVTDKENNLHESEYGDQEGKRLVDTDVARNSSDDIPNNHIPGDHIPDKATVFTDEESYSFESSKFTRTISPPTLGTLRSCFSWSGGLGDFSRTPSPSPSTALQQFRRKSDSPTSLPENNMSDVSQLKSEESSDDESHPLREEACSSQSQESGEFSLQSSNASKLSQCSSKDSDSEESDCNIKLLDSQSDQTSKLRLSHFSKKDTPLRNKVPGLYKSSSADSLSTTKIKPLGPARASGLSKKPASIQKRKHHNAENKPGLQIKLNELWKNFGFKKDSEKLPPCKKPLSPVRDNIQLTPEAEEDIFNKPECGRVQRAIFQ

SEQ ID NO: 174 - protein, 1417 aa, synthetic construct
  REGION 1..1417: note = Synthetic
MAAVPQNNLQEQLERHSARTLNNKLSLSKPKFSGFTFKKKTSSDNNVSVTNVSVAKTPVLRNKDVNVTEDFSFSEPLPNTTNQQRVKDFFKNAPAGQETQRGGSKSLLPDFLQTPKEVVCTTQNTPTVKKSRDTALKKLEFSSSPDSLSTINDWDDMDDFDTSETSKSFVTPPQSHFVRVSTAQKSKKGKRNFFKAQLYTTNTVKTDLPPPSSESEQIDLTEEQKDDSEWLSSDVICIDDGPIAEVHINEDAQESDSLKTHLEDERDNSEKKKNLEEAELHSTEKVPCIEFDDDDYDTDFVPPSPEEIISASSSSSKCLSTLKDLDTSDRKEDVLSTSKDLLSKPEKMSMQELNPETSTDCDARQISLQQQLIHVMEHICKLIDTIPDDKLKLLDCGNELLQQRNIRRKLLTEVDFNKSDASLLGSLWRYRPDSLDGPMEGDSCPTGNSMKELNFSHLPSNSVSPGDCLLTTTLGKTGFSATRKNLFERPLFNTHLQKSFVSSNWAETPRLGKKNESSYFPGNVLTSTAVKDQNKHTASINDLERETQPSYDIDNFDIDDFDDDDDWEDIMHNLAASKSSTAAYQPIKEGRPIKSVSERLSSAKTDCLPVSSTAQNINFSESIQNYTDKSAQNLASRNLKHERFQSLSFPHTKEMMKIFHKKFGLHNFRTNQLEAINAALLGEDCFILMPTGGGKSLCYQLPACVSPGVTVVISPLRSLIVDQVQKLTSLDIPATYLTGDKTDSEATNIYLQLSKKDPIIKLLYVTPEKICASNRLISTLENLYERKLLARFVIDEAHCVSQWGHDFRQDYKRMNMLRQKFPSVPVMALTATANPRVQKDILTQLKILRPQVFSMSFNRHNLKYYVLPKKPKKVAFDCLEWIRKHHPYDSGIIYCLSRRECDTMADTLQRDGLAALAYHAGLSDSARDEVQQKWINQDGCQVICATIAFGMGIDKPDVRFVIHASLPKSVEGYYQESGRAGRDGEISHCLLFYTYHDVTRLKRLIMMEKDGNHHTRETHFNNLYSMVHYCENITECRRIQLLAYFGENGFNPDFCKKHPDVSCDNCCKTKDYKTRDVTDDVKSIVRFVQEHSSSQGMRNIKHVGPSGRFTMNMLVDIFLGSKSAKIQSGIFGKGSAYSRHNAERLFKKLILDKILDEDLYINANDQAIAYVMLGNKAQTVLNGNLKVDFMETENSSSVKKQKALVAKVSQREEMVKKCLGELTEVCKSLGKVFGVHYFNIFNTVTLKKLAESLSSDPEVLLQIDGVTEDKLEKYGAEVISVLQKYSEWTSPAEDSSPGISLSSSRGPGRSAAEELDEEIPVSSHYFASKTRNERKRKKMPASQRSKRRKTASSGSKAKGGSATCRKISSKTKSSSIIGSSSASHTSQATSGANSKLGIMAPPKPINRPFLKPSYAFS

SEQ ID NO: 175 - protein, 1286 aa, synthetic construct
  REGION 1..1286: note = Synthetic
MAAVPQNNLQEQLERHSARTLNNKLSLSKPKFSGFTFKKKTSSDNNVSVTNVSVAKTPVLRNKDVNVTEDFSFSEPLPNTTNQQRVKDFFKNAPAGQETQRGGSKSLLPDFLQTPKEVVCTTQNTPTVKKSRDTALKKLEFSSSPDSLSTINDWDDMDDFDTSETSKSFVTPPQSHFVRVSTAQKSKKGKRNFFKAQLYTTNTVKTDLPPPSSESEQIDLTEEQKDDSEWLSSDVICIDDGPIAEVHINEDAQESDSLKTHLEDERDNSEKKKNLEEAELHSTEKVPCIEFDDDDYDTDFVPPSPEEIISASSSSSKCLSTLKDLDTSDRKEDVLSTSKDLLSKPEKMSMQELNPETSTDCDARQISLQQQLIHVMEHICKLIDTIPDDKLKLLDCGNELLQQRNIRRKLLTEVDFNKSDASLLGSLWRYRPDSLDGPMEGDSCPTGNSMKELNFSHLPSNSVSPGDCLLTTTLGKTGFSATRKNLFERPLFNTHLQKSFVSSNWAETPRLGKKNESSYFPGNVLTSTAVKDQNKHTASINDLERETQPSYDIDNFDIDDFDDDDDWEDIMHNLAASKSSTAAYQPIKEGRPIKSVSERLSSAKTDCLPVSSTAQNINFSESIQNYTDKSAQNLASRNLKHERFQSLSFPHTKEMMKIFHKKFGLHNFRTNQLEAINAALLGEDCFILMPTGGGKSLCYQLPACVSPGVTVVISPLRSLIVDQVQKLTSLDIPATYLTGDKTDSEATNIYLQLSKKDPIIKLLYVTPEKICASNRLISTLENLYERKLLARFVIDEAHCVSQWGHDFRQDYKRMNMLRQKFPSVPVMALTATANPRVQKDILTQLKILRPQVFSMSFNRHNLKYYVLPKKPKKVAFDCLEWIRKHHPYDSGIIYCLSRRECDTMADTLQRDGLAALAYHAGLSDSARDEVQQKWINQDGCQVICATIAFGMGIDKPDVRFVIHASLPKSVEGYYQESGRAGRDGEISHCLLFYTYHDVTRLKRLIMMEKDGNHHTRETHFNNLYSMVHYCENITECRRIQLLAYFGENGFNPDFCKKHPDVSCDNCCKTKDYKTRDVTDDVKSIVRFVQEHSSSQGMRNIKHVGPSGRFTMNMLVDIFLESLSSDPEVLLQIDGVTEDKLEKYGAEVISVLQKYSEWTSPAEDSSPGISLSSSRGPGRSAAEELDEEIPVSSHYFASKTRNERKRKKMPASQRSKRRKTASSGSKAKGGSATCRKISSKTKSSSIIGSSSASHTSQATSGANSKLGIMAPPKPINRPFLKPSYAFS

SEQ ID NO: 176 - protein, 649 aa, synthetic construct
  REGION 1..649: note = Synthetic
MASVSALTEELDSITSELHAVEIQIQELTERQQELIQKKKVLTKKIKQCLEDSDAGASNEYDSSPAAWNKEDFPWSGKVKDILQNVFKLEKFRPLQLETINVTMAGKEVFLVMPTGGGKSLCYQLPALCSDGFTLVICPLISLMEDQLMVLKQLGISATMLNASSSKEHVKWVHAEMVNKNSELKLIYVTPEKIAKSKMFMSRLEKAYEARRFTRIAVDEVHCCSQWGHDFRPDYKALGILKRQFPNASLIGLTATATNHVLTDAQKILCIEKCFTFTASFNRPNLYYEVRQKPSNTEDFIEDIVKLINGRYKGQSGIIYCFSQKDSEQVTVSLQNLGIHAGAYHANLEPEDKTTVHRKWSANEIQVVVATVAFGMGIDKPDVRFVIHHSMSKSMENYYQESGRAGRDDMKADCILYYGFGDIFRISSMVVMENVGQQKLYEMVSYCQNISKCRRVLMAQHFDEVWNSEACNKMCDNCCKDSAFERKNITEYCRDLIKILKQAEELNEKLTPLKLIDSWMGKGAAKLRVAGVVAPTLPREDLEKIIAHFLIQQYLKEDYSFTAYATISYLKIGPKANLLNNEAHAITMQVTKSTQNSFRAESSQTCHSEQGDKKMEEKNSGNFQKKAANMLQQSGSKNTGAKKRKIDDA

SEQ ID NO: 177 - protein, 1432 aa, synthetic construct
  REGION 1..1432: note = Synthetic
MSEKKLETTAQQRKCPEWMNVQNKRCAVEERKACVRKSVFEDDLPFLEFTGSIVYSYDASDCSFLSEDISMSLSDGDVVGFDMEWPPLYNRGKLGKVALIQLCVSESKCYLFHVSSMSVFPQGLKMLLENKAVKKAGVGIEGDQWKLLRDFDIKLKNFVELTDVANKKLKCTETWSLNSLVKHLLGKQLLKDKSIRCSNWSKFPLTEDQKLYAATDAYAGFIIYRNLEILDDTVQRFAINKEEEILLSDMNKQLTSISEEVMDLAKHLPHAFSKLENPRRVSILLKDISENLYSLRRMIIGSTNIETELRPSNNLNLLSFEDSTTGGVQQKQIREHEVLIHVEDETWDPTLDHLAKHDGEDVLGNKVERKEDGFEDGVEDNKLKENMERACLMSLDITEHELQILEQQSQEEYLSDIAYKSTEHLSPNDNENDTSYVIESDEDLEMEMLKHLSPNDNENDTSYVIESDEDLEMEMLKSLENLNSGTVEPTHSKCLKMERNLGLPTKEEEEDDENEANEGEEDDDKDFLWPAPNEEQVTCLKMYFGHSSFKPVQWKVIHSVLEERRDNVAVMATGYGKSLCFQYPPVYVGKIGLVISPLISLMEDQVLQLKMSNIPACFLGSAQSENVLTDIKLGKYRIVYVTPEYCSGNMGLLQQLEADIGITLIAVDEAHCISEWGHDFRDSFRKLGSLKTALPMVPIVALTATASSSIREDIVRCLNLRNPQITCTGFDRPNLYLEVRRKTGNILQDLQPFLVKTSSHWEFEGPTIIYCPSRKMTQQVTGELRKLNLSCGTYHAGMSFSTRKDIHHRFVRDEIQCVIATIAFGMGINKADIRQVIHYGAPKDMESYYQEIGRAGRDGLQSSCHVLWAPADINLNRHLLTEIRNEKFRLYKLKMMAKMEKYLHSSRCRRQIILSHFEDKQVQKASLGIMGTEKCCDNCRSRLDHCYSMDDSEDTSWDFGPQAFKLLSAVDILGEKFGIGLPILFLRGSNSQRLADQYRRHSLFGTGKDQTESWWKAFSRQLITEGFLVEVSRYNKFMKICALTKKGRNWLHKANTESQSLILQANEELCPKKLLLPSSKTVSSGTKEHCYNQVPVELSTEKKSNLEKLYSYKPCDKISSGSNISKKSIMVQSPEKAYSSSQPVISAQEQETQIVLYGKLVEARQKHANKMDVPPAILATNKILVDMAKMRPTTVENVKRIDGVSEGKAAMLAPLLEVIKHFCQTNSVQTDLFSSTKPQEEQKTSLVAKNKICTLSQSMAITYSLFQEKKMPLKSIAESRILPLMTIGMHLSQAVKAGCPLDLERAGLTPEVQKIIADVIRNPPVNSDMSKISLIRMLVPENIDTYLIHMAIEILKHGPDSGLQPSCDVNKRRCFPGSEEICSSSKRSKEEVGINTETSSAERKRRLPVWFAKGSDTSKKLMDKTKRGGLFS

SEQ ID NO: 178 - protein, 1208 aa, synthetic construct
  REGION 1..1208: note = Synthetic
MERLRDVRERLQAWERAFRRQRGRRPSQDDVEAAPEETRALYREYRTLKRTTGQAGGGLRSSESLPAAAEEAPEPRCWGPHLNRAATKSPQSTPGRSRQGSVPDYGQRLKANLKGTLQAGPALGRRPWPLGRASSKASTPKPPGTGPVPSFAEKVSDEPPQLPEPQPRPGRLQHLQASLSQRLGSLDPGWLQRCHSEVPDFLGAPKACRPDLGSEESQLLIPGESAVLGPGAGSQGPEASAFQEVSIRVGSPQPSSSGGEKRRWNEEPWESPAQVQQESSQAGPPSEGAGAVAVEEDPPGEPVQAQPPQPCSSPSNPRYHGLSPSSQARAGKAEGTAPLHIFPRLARHDRGNYVRLNMKQKHYVRGRALRSRLLRKQAWKQKWRKKGECFGGGGATVTTKESCFLNEQFDHWAAQCPRPASEEDTDAVGPEPLVPSPQPVPEVPSLDPTVLPLYSLGPSGQLAETPAEVFQALEQLGHQAFRPGQERAVMRILSGISTLLVLPTGAGKSLCYQLPALLYSRRSPCLTLVVSPLLSLMDDQVSGLPPCLKAACIHSGMTRKQRESVLQKIRAAQVHVLMLTPEALVGAGGLPPAAQLPPVAFACIDEAHCLSQWSHNFRPCYLRVCKVLRERMGVHCFLGLTATATRRTASDVAQHLAVAEEPDLHGPAPVPTNLHLSVSMDRDTDQALLTLLQGKRFQNLDSIIIYCNRREDTERIAALLRTCLHAAWVPGSGGRAPKTTAEAYHAGMCSRERRRVQRAFMQGQLRVVVATVAFGMGLDRPDVRAVLHLGLPPSFESYVQAVGRAGRDGQPAHCHLFLQPQGEDLRELRRHVHADSTDFLAVKRLVQRVFPACTCTCTRPPSEQEGAVGGERPVPKYPPQEAEQLSHQAAPGPRRVCMGHERALPIQLTVQALDMPEEAIETLLCYLELHPHHWLELLATTYTHCRLNCPGGPAQLQALAHRCPPLAVCLAQQLPEDPGQGSSSVEFDMVKLVDSMGWELASVRRALCQLQWDHEPRTGVRRGTGVLVEFSELAFHLRSPGDLTAEEKDQICDFLYGRVQARERQALARLRRTFQAFHSVAFPSCGPCLEQQDEERSTRLKDLLGRYFEEEEGQEPGGMEDAQGPEPGQARLQDWEDQVRCDIRQFLSLRPEEKFSSRAVARIFHGIGSPCYPAQVYGQDRRFWRKYLHLSFHALVGLATEELLQVAR

SEQ ID NO: 179 - protein, 991 aa, Homo sapiens
MSSHHTTFPFDPERRVRSTLKKVFGFDSFKTPLQESATMAVVKGNKDVFVCMPTGAGKSLCYQLPALLAKGITIVVSPLIALIQDQVDHLLTLKVRVSSLNSKLSAQERKELLADLEREKPQTKILYITPEMAASSSFQPTLNSLVSRHLLSYLVVDEAHCVSQWGHDFRPDYLRLGALRSRLGHAPCVALTATATPQVQEDVFAALHLKKPVAIFKTPCFRANLFYDVQFKELISDPYGNLKDFCLKALGQEADKGLSGCGIVYCRTREACEQLAIELSCRGVNAKAYHAGLKASERTLVQNDWMEEKVPVIVATISFGMGVDKANVRFVAHWNIAKSMAGYYQESGRAGRDGKPSWCRLYYSRNDRDQVSFLIRKEVAKLQEKRGNKASDKATIMAFDALVTFCEELGCRHAAIAKYFGDALPACAKGCDHCQNPTAVRRRLEALERSSSWSKTCIGPSQGNGFDPELYEGGRKGYGDFSRYDEGSGGSGDEGRDEAHKREWNLFYQKQMQLRKGKDPKIEEFVPPDENCPLKEASSRRIPRLTVKAREHCLRLLEEALSSNRQSTRTADEADLRAKAVELEHETFRNAKVANLYKASVLKKVADIHRASKDGQPYDMGGSAKSCSAQAEPPEPNEYDIPPASHVYSLKPKRVGAGFPKGSCPFQTATELMETTRIREQAPQPERGGEHEPPSRPCGLLDEDGSEPLPGPRGEVPGGSAHYGGPSPEKKAKSSSGGSSLAKGRASKKQQLLATAAHKDSQSIARFFCRRVESPALLASAPEAEGACPSCEGVQGPPMAPEKYTGEEDGAGGHSPAPPQTEECLRERPSTCPPRDQGTPEVQPTPAKDTWKGKRPRSQQENPESQPQKRPRPSAKPSVVAEVKGSVSASEQGTLNPTAQDPFQLSAPGVSLKEAANVVVKCLTPFYKEGKFASKELFKGFARHLSHLLTQKTSPGRSVKEEAQNLIRHFFHGRARCESEADWHGLCGPQR

SEQ ID NO: 180 - protein, 435 aa, Homo sapiens
MSSHHTTFPFDPERRVRSTLKKVFGFDSFKTPLQESATMAVVKGNKDVFVCMPTGAGKSLCYQLPALLAKGITIVVSPLIALIQDQVDHLLTLKVRVSSLNSKLSAQERKELLADLEREKPQTKILYITPEMAASSSFQPTLNSLVSRHLLSYLVVDEAHCVSQWGHDFRPDYLRLGALRSRLGHAPCVALTATATPQVQEDVFAALHLKKPVAIFKTPCFRANLFYDVQFKELISDPYGNLKDFCLKALGQEADKGLSGCGIVYCRTREACEQLAIELSCRGVNAKAYHAGLKASERTLVQNDWMEEKVPVIVATISFGMGVDKANVRFVAHWNIAKSMAGYYQESGRAGRDGKPSWCRLYYSRNDRDQVSFLIRKEVAKLQEKRGNKASDKATIMAFDALVTFCEELGRWGRGHGKSLRAAWCSQVVSRHAEL

SEQ ID NO: 181 - protein, 410 aa, synthetic construct
  REGION 1..410: note = Synthetic
MSSHHTTFPFDPERRVRSTLKKVFGFDSFKTPLQESATMAVVKGNKDVFVCMPTGAGKSLCYQLPALLAKGITIVVSPLIALIQDQVDHLLTLKVRVSSLNSKLSAQERKELLADLEREKPQTKILYITPEMAASSSFQPTLNSLVSRHLLSYLVVDEAHCVSQWGHDFRPDYLRLGALRSRLGHAPCVALTATATPQVQEDVFAALHLKKPVAIFKTPCFRANLFYDVQFKELISDPYGNLKDFCLKALGQEADKGLSGCGIVYCRTREACEQLAIELSCRGVNAKAYHAGLKASERTLVQNDWMEEKVPVIVATISFGMGVDKANVRFVAHWNIAKSMAGYYQESGRAGRDGKPSWCRLYYSRNDRDQVSFLIRKEVAKLQEKRGNKASDKATIMAFDALVTFCEELG

SEQ ID NO: 182 - protein, 121 aa, Homo sapiens
MVDMMDLPRSRINAGMLAQFIDKPVCFVGRLEKIHPTGKMFILSDGEGKNGTIELMEPLDEEISGIVEVVGRVTAKATILCTSYVQFKEDSHPFDLGLYNEAVKIIHDFPQFYPLGIVQHD

SEQ ID NO: 183 - protein, 307 aa, synthetic construct
  REGION 1..307: note = Synthetic
MAEISDLDRQIEQLRRCELIKESEVKALCAKAREILVEESNVQRVDSPVTVCGDIHGQFYDLKELFRVGGDVPETNYLFMGDFVDRGFYSVETFLLLLALKVRYPDRITLIRGNHESRQITQVYGFYDECLRKYGSVTVWRYCTEIFDYLSLSAIIDGKIFCVHGGLSPSIQTLDQIRTIDRKQEVPHDGPMCDLLWSDPEDTTGWGVSPRGAGYLFGSDVVAQFNAANDIDMICRAHQLVMEGYKWHFNETVLTVWSAPNYCYRCGNVAAILELDEHLQKDFIIFEAAPQETRGIPSKKPVADYFL

SEQ ID NO: 184 - protein, 339 aa, Homo sapiens
MAMQMQLEANADTSVEEESFGPQPISRLEQCGINANDVKKLEEAGFHTVEAVAYAPKKELINIKGISEAKADKILAEAAKLVPMGFTTATEFHQRRSEIIQITTGSKELDKLLQGGIETGSITEMFGEFRTGKTQICHTLAVTCQLPIDRGGGEGKAMYIDTEGTFRPERLLAVAERYGLSGSDVLDNVAYARAFNTDHQTQLLYQASAMMVESRYALLIVDSATALYRTDYSGRGELSARQMHLARFLRMLLRLADEFGVAVVITNQVVAQVDGAAMFAADPKKPIGGNIIAHASTTRLYLRKGRGETRICKIYDSPCLPEAEAMFAINADGVGDAKD

SEQ ID NO: 185 - protein, 340 aa, Homo sapiens
MAMQMQLEANADTSVEEESFGPQPISRLEQCGINANDVKKLEEAGFHTVEAVAYAPKKELINIKGISEAKADKILTESRSVARLECNSVILVYCTLRLSGSSDSPASASRVVGTTGGIETGSITEMFGEFRTGKTQICHTLAVTCQLPIDRGGGEGKAMYIDTEGTFRPERLLAVAERYGLSGSDVLDNVAYARAFNTDHQTQLLYQASAMMVESRYALLIVDSATALYRTDYSGRGELSARQMHLARFLRMLLRLADEFGVAVVITNQVVAQVDGAAMFAADPKKPIGGNIIAHASTTRLYLRKGRGETRICKIYDSPCLPEAEAMFAINADGVGDAKD

SEQ ID NO: 186 - protein, 280 aa, synthetic construct
  REGION 1..280: note = Synthetic
MAMQMQLEANADTSVEEESFGPQPISRLEQCGINANDVKKLEEAGFHTVEAVAYAPKKELINIKGISEAKADKILAEAAKLVPMGFTTATEFHQRRSEIIQITTGSKELDKLLQGGIETGSITEMFGEFRTGKTQICHTLAVTCQLPIDRGGGEGKAMYIDTEGTFRPERLLAVAERYGLSGSDVLDNVAYARAFNTDHQTQLLYQASAMMVESRYALLIVDSATALYRTDYSGRGELSARQMHLARFLRMLLRLADEIVSEERKRGNQNLQNLRLSLSS

SEQ ID NO: 187 - protein, 736 aa, Homo sapiens
MSLSENSVFAYESSVHSTNVLLSLNDQRKKDVLCDVTIFVEGQRFRAHRSVLAACSSYFHSRIVGQADGELNITLPEEVTVKGFEPLIQFAYTAKLILSKENVDEVCKCVEFLSVHNIEESCFQFLKFKFLDSTADQQECPRKKCFSSHCQKTDLKLSLLDQRDLETDEVEEFLENKNVQTPQCKLRRYQGNAKASPPLQDSASQTYESMCLEKDAALALPSLCPKYRKFQKAFGTDRVRTGESSVKDIHASVQPNERSENECLGGVPECRDLQVMLKCDESKLAMEPEETKKDPASQCPTEKSEVTPFPHNSSIDPHGLYSLSLLHTYDQYGDLNFAGMQNTTVLTEKPLSGTDVQEKTFGESQDLPLKSDLGTREDSSVASSDRSSVEREVAEHLAKGFWSDICSTDTPCQMQLSPAVAKDGSEQISQKRSECPWLGIRISESPEPGQRTFTTLSSVNCPFISTLSTEGCSSNLEIGNDDYVSEPQQEPCPYACVISLGDDSETDTEGDSESCSAREQECEVKLPFNAQRIISLSRNDFQSLLKMHKLTPEQLDCIHDIRRRSKNRIAAQRCRKRKLDCIQNLESEIEKLQSEKESLLKERDHILSTLGETKQNLTGLCQKVCKEAALSQEQIQILAKYSAADCPLSFLISEKDKSTPDGELALPSIFSLSDRPPAVLPPCARGNSEPGYARGQESQQMSTATSEQAGPAEQCRQSGGISDFCQQMTDKCTTDE

SEQ ID NO: 188 - protein, 1249 aa, synthetic construct
  REGION 1..1249: note = Synthetic
MSSMWSEYTIGGVKIYFPYKAYPSQLAMMNSILRGLNSKQHCLLESPTGSGKSLALLCSALAWQQSLSGKPADEGVSEKAEVQLSCCCACHSKDFTNNDMNQGTSRHFNYPSTPPSERNGTSSTCQDSPEKTTLAAKLSAKKQASIYRDENDDFQVEKKRIRPLETTQQIRKRHCFGTEVHNLDAKVDSGKTVKLNSPLEKINSFSPQKPPGHCSRCCCSTKQGNSQESSNTIKKDHTGKSKIPKIYFGTRTHKQIAQITRELRRTAYSGVPMTILSSRDHTCVHPEVVGNFNRNEKCMELLDGKNGKSCYFYHGVHKISDQHTLQTFQGMCKAWDIEELVSLGKKLKACPYYTARELIQDADIIFCPYNYLLDAQIRESMDLNLKEQVVILDEAHNIEDCARESASYSVTEVQLRFARDELDSMVNNNIRKKDHEPLRAVCCSLINWLEANAEYLVERDYESACKIWSGNEMLLTLHKMGITTATFPILQGHFSAVLQKEEKISPIYGKEEAREVPVISASTQIMLKGLFMVLDYLFRQNSRFADDYKIAIQQTYSWTNQIDISDKNGLLVLPKNKKRSRQKTAVHVLNFWCLNPAVAFSDINGKVQTIVLTSGTLSPMKSFSSELGVTFTIQLEANHIIKNSQVWVGTIGSGPKGRNLCATFQNTETFEFQDEVGALLLSVCQTVSQGILCFLPSYKLLEKLKERWLSTGLWHNLELVKTVIVEPQGGEKTNFDELLQVYYDAIKYKGEKDGALLVAVCRGKVSEGLDFSDDNARAVITIGIPFPNVKDLQVELKRQYNDHHSKLRGLLPGRQWYEIQAYRALNQALGRCIRHRNDWGALILVDDRFRNNPSRYISGLSKWVRQQIQHHSTFESALESLAEFSKKHQKVLNVSIKDRTNIQDNESTLEVTSLKYSTSPYLLEAASHLSPENFVEDEAKICVQELQCPKIITKNSPLPSSIISRKEKNDPVFLEEAGKAEKIVISRSTSPTFNKQTKRVSWSSFNSLGQYFTGKIPKATPELGSSENSASSPPRFKTEKMESKTVLPFTDKCESSNLTVNTSFGSCPQSETIISSLKIDATLTRKNHSEHPLCSEEALDPDIELSLVSEEDKQSTSNRDFETEAEDESIYFTPELYDPEDTDEEKNDLAETDRGNRLANNSDCILAKDLFEIRTIKEVDSAREVKAEDCIDTKLNGILHIEESKIDDIDGNVKTTWINELELGKTHEIEIKNFKPSPSKNKGMFPGFK

SEQ ID NO: 189 - protein, 1522 aa, synthetic construct
  REGION 1..1522: note = Synthetic
MSRNDKEPFFVKFLKSSDNSKCFFKALESIKEFQSEEYLQIITEEEALKIKENDRSLYICDPFSGVVFDHLKKLGCRIVGPQVVIFCMHHQRCVPRAEHPVYNMVMSDVTISCTSLEKEKREEVHKYVQMMGGRVYRDLNVSVTHLIAGEVGSKKYLVAANLKKPILLPSWIKTLWEKSQEKKITRYTDINMEDFKCPIFLGCIICVTGLCGLDRKEVQQLTVKHGGQYMGQLKMNECTHLIVQEPKGQKYECAKRWNVHCVTTQWFFDSIEKGFCQDESIYKTEPRPEAKTMPNSSTPTSQINTIDSRTLSDVSNISNINASCVSESICNSLNSKLEPTLENLENLDVSAFQAPEDLLDGCRIYLCGFSGRKLDKLRRLINSGGGVRFNQLNEDVTHVIVGDYDDELKQFWNKSAHRPHVVGAKWLLECFSKGYMLSEEPYIHANYQPVEIPVSHKPESKAALLKKKNSSFSKKDFAPSEKHEQADEDLLSQYENGSSTVVEAKTSEARPFNDSTHAEPLNDSTHISLQEENQSSVSHCVPDVSTITEEGLFSQKSFLVLGFSNENESNIANIIKENAGKIMSLLSRTVADYAVVPLLGCEVEATVGEVVTNTWLVTCIDYQTLFDPKSNPLFTPVPVMTGMTPLEDCVISFSQCAGAEKESLTFLANLLGASVQEYFVRKSNAKKGMFASTHLILKERGGSKYEAAKKWNLPAVTIAWLLETARTGKRADESHFLIENSTKEERSLETEITNGINLNSDTAEHPGTRLQTHRKTVVTPLDMNRFQSKAFRAVVSQHARQVAASPAVGQPLQKEPSLHLDTPSKFLSKDKLFKPSFDVKDALAALETPGRPSQQKRKPSTPLSEVIVKNLQLALANSSRNAVALSASPQLKEAQSEKEEAPKPLHKVVVCVSKKLSKKQSELNGIAASLGADYRWSFDETVTHFIYQGRPNDTNREYKSVKERGVHIVSEHWLLDCAQECKHLPESLYPHTYNPKMSLDISAVQDGRLCNSRLLSAVSSTKDDEPDPLILEENDVDNMATNNKESAPSNGSGKNDSKGVLTQTLEMRENFQKQLQEIMSATSIVKPQGQRTSLSRSGCNSASSTPDSTRSARSGRSRVLEALRQSRQTVPDVNTEPSQNEQIIWDDPTAREERARLASNLQWPSCPTQYSELQVDIQNLEDSPFQKPLHDSEIAKQAVCDPGNIRVTEAPKHPISEELETPIKDSHLIPTPQAPSIAFPLANPPVAPHPREKIITIEETHEELKKQYIFQLSSLNPQERIDYCHLIEKLGGLVIEKQCFDPTCTHIVVGHPLRNEKYLASVAAGKWVLHRSYLEACRTAGHFVQEEDYEWGSSSILDVLTGINVQQRRLALAAMRWRKKIQQRQESGIVEGAFSGWKVILHVDQSREAGFKRLLQSGGAKVLPGHSVPLFKEATHLFSDLNKLKPDDSGVNIAEAAAQNVYCLRTEYIADYLMQESPPHVENYCLPEAISFIQNNKELGTGLSQKRKAPTEKNKIKRPRVH

SEQ ID NO: 190 - protein, 1001 aa, Homo sapiens
MIFPVARYALRWLRRPEDRAFSRAAMEMALRGVRKVLCVAEKNDAAKGIADLLSNGRMRRREGLSKFNKIYEFDYHLYGQNVTMVMTSVSGHLLAHDFQMQFRKWQSCNPLVLFEAEIEKYCPENFVDIKKTLERETRQCQALVIWTDCDREGENIGFEIIHVCKAVKPNLQVLRARFSEITPHAVRTACENLTEPDQRVSDAVDVRQELDLRIGAAFTRFQTLRLQRIFPEVLAEQLISYGSCQFPTLGFVVERFKAIQAFVPEIFHRIKVTHDHKDGIVEFNWKRHRLFNHTACLVLYQLCVEDPMATVVEVRSKPKSKWRPQALDTVELEKLASRKLRINAKETMRIAEKLYTQGYISYPRTETNIFPRDLNLTVLVEQQTPDPRWGAFAQSILERGGPTPRNGNKSDQAHPPIHPTKYTNNLQGDEQRLYEFIVRHFLACCSQDAQGQETTVEIDIAQERFVAHGLMILARNYLDVYPYDHWSDKILPVYEQGSHFQPSTVEMVDGETSPPKLLTEADLIALMEKHGIGTDATHAEHIETIKARMYVGLTPDKRFLPGHLGMGLVEGYDSMGYEMSKPDLRAELEADLKLICDGKKDKFVVLRQQVQKYKQVFIEAVAKAKKLDEALAQYFGNGTELAQQEDIYPAMPEPIRKCPQCNKDMVLKTKKNGGFYLSCMGFPECRSAVWLPDSVLEASRDSSVCPVCQPHPVYRLKLKFKRGSLPPTMPLEFVCCIGGCDDTLREILDLRFSGGPPRASQPSGRLQANQSLNRMDNSQHPQPADSRQTGSSKALAQTLPPPTAAGESNSVTCNCGQEAVLLTVRKEGPNRGRQFFKCNGGSCNFFLWADSPNPGAGGPPALAYRPLGASLGCPPGPGIHLGGFGNPGDGSGSGTSCLCSQPSVTRTVQKDGPNKGRQFHTCAKPREQQCGFFQWVDENTAPGTSGAPSWTGDRGRTLESEARSKRPRASSSDMGSTAKKPRKCSLCHQPGHTRPFCPQNR

SEQ ID NO: 191 - protein, 380 aa, synthetic construct
  REGION 1..380: note = Synthetic
MGIQGLAKLIADVAPSAIRENDIKSYFGRKVAIDASMSIYQFLIAVRQGGDVLQNEEGETTSHLMGMFYRTIRMMENGIKPVYVFDGKPPQLKSGELAKRSERRAEAEKQLQQAQAAGAEQEVEKFTKRLVKVTKQHNDECKHLLSLMGIPYLDAPSEAEASCAALVKAGKVYAAATEDMDCLTFGSPVLMRHLTASEAKKLPIQEFHLSRILQELGLNQEQFVDLCILLGSDYCESIRGIGPKRAVDLIQKHKSIEEIVRRLDPNKYPVPENWLHKEAHQLFLEPEVLDPESVELKWSEPNEEELIKFMCGEKQFSEERIRSGVKRLSKSRQGSTQGRLDDFFKVTGSLSSAKRKEPEPKGSTKKKAKTGAAGKFKRGK

SEQ ID NO: 192 - protein, 551 aa, Homo sapiens
MAAPVRLGRKRPLPACPNPLFVRWLTEWRDEATRSRRRTRFVFQKALRSLRRYPLPLRSGKEAKILQHFGDGLCRMLDERLQRHRTSGGDHAPDSPSGENSPAPQGRLAEVQDSSMPVPAQPKAGGSGSYWPARHSGARVILLVLYREHLNPNGHHFLTKEELLQRCAQKSPRVAPGSARPWPALRSLLHRNLVLRTHQPARYSLTPEGLELAQKLAESEGLSLLNVGIGPKEPPGEETAVPGAASAELASEAGVQQQPLELRPGEYRVLLCVDIGETRGGGHRPELLRELQRLHVTHTVRKLHVGDFVWVAQETNPRDPANPGELVLDHIVERKRLDDLCSSIIDGRFREQKFRLKRCGLERRVYLVEEHGSVHNLSLPESTLLQAVTNTQVIDGFFVKRTADIKESAAYLALLTRGLQRLYQGHTLRSRPWGTPGNPESGAMTSPNPLCSLLTFSDFNAGAIKNKAQSVREVFARQLMQVRGVSGEKAAALVDRYSTPASLLAAYDACATPKEQETLLSTIKCGRLQRNLGPALSRTLSQLYCSYGPLT

SEQ ID NO: 193 - protein, 583 aa, Homo sapiens
MALKKSSPSLDSGDSDSEELPTFAFLKKEPSSTKRRQPEREEKIVVVDISDCEASCPPAPELFSPPVPEIAETVTQTQPVRLLSSESEDEEEFIPLAQRLTCKFLTHKQLSPEDSSSPVKSVLDHQNNEGASCDWKKPFPKIPEVPLHDTPERSAADNKDLILDPCCQLPAYLSTCPGQSSSLAVTKTNSDILPPQKKTKPSQKVQGRGSHGCRQQRQARQKESTLRRQERKNAALVTRMKAQRPEECLKHIIVVLDPVLLQMEGGGQLLGALQTMECRCVIEAQAVPCSVTWRRRAGPSEDREDWVEEPTVLVLLRAEAFVSMIDNGKQGSLDSTMKGKETLQGFVTDITAKTAGKALSLVIVDQEKCFSLELLFFDFLPCTSAQNPPRRGKQGANKQTKKQQQRQPEASIGSMVSRVDAEEALVDLQLHTEAQAQIVQSWKELADFTCAFTKAVAEAPFKKLRDETTFSFCLESDWAGGVKVDLAGRGLALVWRRQIQQLNRVSLEMASAVVNAYPSPQLLVQAYQQCFSDKERQNLLADIQVRRGEGVTSTSRRIGPELSRRIYLQMTTLQPHLSLDSAD

SEQ ID NO: 194 - protein, 570 aa, Homo sapiens
MALKKSSPSLDSGDSDSEELPTFAFLKKEPSSTKRRQPEREEKIVVVDISDCEASCPPAPELFSPPVPEIAETVTQTQPVRLLSSESEDEEEFIPLAQRLTCKFLTHKQLSPEDSSSPVKSVLDHQNNEGASCDWKKPFPKIPEVPLHDTPERSAADNKDLILDPCCQLPAYLSTCPGQSSSLAVTKTNSDILPPQKKTKPSQKVQGRGSHGCRQQRQARQKESTLRRQERKNAALVTRMKAQRPEECLKHIIVVLDPVLLQMEGGGQLLGALQTMECRCVIEAQAVPCSVTWRRRAGPSEDREDWVEEPTVLVLLRAEAFVSMIDNGKQGSLDSTMKGKETLQGFVTDITAKTAGKALSLVIVDQEKCFSAQNPPRRGKQGANKQTKKQQQRQPEASIGSMVSRVDAEEALVDLQLHTEAQAQIVQSWKELADFTCAFTKAVAEAPFKKLRDETTFSFCLESDWAGGVKVDLAGRGLALVWRRQIQQLNRVSLEMASAVVNAYPSPQLLVQAYQQCFSDKERQNLLADIQVRRGEGVTSTSRRIGPELSRRIYLQMTTLQPHLSLDSAD

SEQ ID NO: 195 - protein, 275 aa, Homo sapiens
MGPAGVAARPGRFFGVYLLYCLNPRYRGRVYVGFTVNTARRVQQHNGGRKKGGAWRTSGRGPWEMVLVVHGFPSSVAALRFEWAWQHPHASRRLAHVGPRLRGETAFAFHLRVLAHMLRAPPWARLPLTLRWVRPDLRQDLCLPPPPHVPLAFGPPPPQAPAPRRRAGPFDDAEPEPDQGDPGACCSLCAQTIQDEEGPLCCPHPGCLLRAHVICLAEEFLQEEPGQLLPLEGQCPCCEKSLLWGDLIWLCQMDTEKEVEDSELEEAHWTDLLET

SEQ ID NO: 196 - protein, 161 aa, Homo sapiens
MGPAGVAARPGRFFGVYLLYCLNPRYRGRVYVGFTVNTARRVQQHNGGRKKGGAWRTSGRGPWEMVLVVHGFPSSVAALRDEEGPLCCPHPGCLLRAHVICLAEEFLQEEPGQLLPLEGQCPCCEKSLLWGDLIWLCQMDTEKEVEDSELEEAHWTDLLET

SEQ ID NO: 197 - protein, 1834 aa, Homo sapiens
MKLSVNEAQLGFYLGSLSHLSACPGIDPRSSEDQPESLKTGQMMDESDEDFKELCASFFQRVKKHGIKEVSGERKTQKAASNGTQIRSKLKRTKQTATKTKTLQGPAEKKPPSGSQAPRTKKQRVTKWQASEPAHSVNGEGGVLASAPDPPVLRETAQNTQTGNQQEPSPNLSREKTRENVPNSDSQPPPSCLTTAVPSPSKPRTAQLVLQRMQQFKRADPERLRHASEECSLEAAREENVPKDPQEEMMAGNVYGLGPPAPESDAAVALTLQQEFARVGASAHDDSLEEKGLFFCQICQKNLSAMNVTRREQHVNRCLDEAEKTLRPSVPQIPECPICGKPFLTLKSRTSHLKQCAVKMEVGPQLLLQAVRLQTAQPEGSSSPPMFSFSDHSRGLKRRGPTSKKEPRKRRKVDEAPSEDLLVAMALSRSEMEPGAAVPALRLESAFSERIRPEAENKSRKKKPPVSPPLLLVQDSETTGRQIEDRVALLLSEEVELSSTPPLPASRILKEGWERAGQCPPPPERKQSFLWEGSALTGAWAMEDFYTARLVPPLVPQRPAQGLMQEPVPPLVPPEHSELSERRSPALHGTPTAGCGSRGPSPSASQREHQALQDLVDLAREGLSASPWPGSGGLAGSEGTAGLDVVPGGLPLTGFVVPSQDKHPDRGGRTLLSLGLLVADFGAMVNNPHLSDVQFQTDSGEVLYAHKFVLYARCPLLIQYVNNEGFSAVEDGVLTQRVLLGDVSTEAARTFLHYLYTADTGLPPGLSSELSSLAHRFGVSELVHLCEQVPIATDSEGKPWEEKEAENCESRAENFQELLRSMWADEEEEAETLLKSKDHEEDQENVNEAEMEEIYEFAATQRKLLQEERAAGAGEDADWLEGGSPVSGQLLAGVQVQKQWDKVEEMEPLEPGRDEAATTWEKMGQCALPPPQGQHSGARGAEAPEQEAPEEALGHSSCSSPSRDCQAERKEGSLPHSDDAGDYEQLFSSTQGEISEPSQITSEPEEQSGAVRERGLEVSHRLAPWQASPPHPCRFLLGPPQGGSPRGSHHTSGSSLSTPRSRGGTSQVGSPTLLSPAVPSKQKRDRSILTLSKEPGHQKGKERRSVLECRNKGVLMFPEKSPSIDLTQSNPDHSSSRSQKSSSKLNEEDEVILLLDSDEELELEQTKMKSISSDPLEEKKALEISPRSCELFSIIDVDADQEPSQSPPRSEAVLQQEDEGALPENRGSLGRRGAPWLFCDRESSPSEASTTDTSWLVPATPLASRSRDCSSQTQISSLRSGLAVQAVTQHTPRASVGNREGNEVAQKFSVIRPQTPPPQTPSSCLTPVSPGTSDGRRQGHRSPSRPHPGGHPHSSPLAPHPISGDRAHFSRRFLKHSPPGPSFLNQTPAGEVVEVGDSDDEQEVASHQANRSPPLDSDPPIPIDDCCWHMEPLSPIPIDHWNLERTGPLSTSSPSRRMNEAADSRDCRSPGLLDTTPIRGSCTTQRKLQEKSSGAGSLGNSRPSFLNSALWDVWDGEEQRPPETPPPAQMPSAGGAQKPEGLETPKGANRKKNLPPKVPITPMPQYSIMETPVLKKELDRFGVRPLPKRQMVLKLKEIFQYTHQTLDSDSEDESQSSQPLLQAPHCQTLASQTYKPSRAGVHAQQEATTGPGAHRPKGPAKTKGPRHQRKHHESITPPSRSPTKEAPPGLNDDAQIPASQESVATSVDGSDSSLSSQSSSSCEFGAAFESAGEEEGEGEVSASQAAVQAADTDEALRCYIRSKPALYQKVLLYQPFELRELQAELRQNGLRVSSRRLLDFLDTHCITFTTAATRREKLQGRRRQPRGKKKVERN

SEQ ID NO: 198 - RNA, 19 nt, synthetic construct
  misc_feature 1..19: note = Synthetic
  source 1..19: mol_type = other RNA
cagctacccttccatcata

SEQ ID NO: 199 - RNA, 19 nt, synthetic construct
  misc_feature 1..19: note = Synthetic
  source 1..19: mol_type = other RNA
gggataccatgcaacataa

SEQ ID NO: 200 - RNA, 19 nt, synthetic construct
  misc_feature 1..19: note = Synthetic
  source 1..19: mol_type = other RNA
gaaggagctttcatcattc

SEQ ID NO: 201 - protein, 48 aa, synthetic construct
  REGION 1..48: note = Synthetic
  VARIANT 1..48: note = misc_feature - This sequence may encompass 1-4 repeating GSAGSAAGSGEF units
GSAGSAAGSGEFGSAGSAAGSGEFGSAGSAAGSGEFGSAGSAAGSGEF

SEQ ID NO: 202 - protein, 48 aa, synthetic construct
  REGION 1..48: note = Synthetic
  VARIANT 1..48: note = misc_feature - This sequence may encompass 1-4 SIVAQLSRPDPA repeating units
SIVAQLSRPDPASIVAQLSRPDPASIVAQLSRPDPASIVAQLSRPDPA

SEQ ID NO: 203 - RNA, 19 nt, synthetic construct
  misc_feature 1..19: note = Synthetic
  source 1..19: mol_type = other RNA
ctagaaatctgttgctatg

SEQ ID NO: 204 - RNA, 21 nt, synthetic construct
  misc_feature 1..21: note = Synthetic
  source 1..21: mol_type = other RNA
  misc_feature 1..19: note = RNA
  misc_feature 20..21: note = DNA
ttctttaatagactgggtcac

SEQ ID NO: 205 - DNA, 21 bp, synthetic construct
  misc_feature 1..21: note = Synthetic
  source 1..21: mol_type = other DNA
  misc_feature 1..19: note = RNA
  misc_feature 20..21: note = DNA
tatgatggaagggtagctgtt

SEQ ID NO: 206 - DNA, 21 bp, synthetic construct
  misc_feature 1..21: note = Synthetic
  source 1..21: mol_type = other DNA
  misc_feature 1..19: note = RNA
  misc_feature 20..21: note = DNA
tatcaggttatgttgcatggt

SEQ ID NO: 207 - RNA, 19 nt, synthetic construct
  misc_feature 1..19: note = Synthetic
  source 1..19: mol_type = other RNA
gaaacggacttgctattta

SEQ ID NO: 208 - RNA, 19 nt, synthetic construct
  misc_feature 1..19: note = Synthetic
  source 1..19: mol_type = other RNA
gtaaagaaatgcagaattc

SEQ ID NO: 209 - RNA, 19 nt, synthetic construct
  misc_feature 1..19: note = Synthetic
  source 1..19: mol_type = other RNA
ggtatcagatgcttcatta

SEQ ID NO: 210 - RNA, 19 nt, synthetic construct
  misc_feature 1..19: note = Synthetic
  source 1..19: mol_type = other RNA
gaagaatgcaggtttaata

SEQ ID NO: 211 - DNA, 21 bp, synthetic construct
  misc_feature 1..21: note = Synthetic
  source 1..21: mol_type = other DNA
  misc_feature 1..19: note = RNA
  misc_feature 20..21: note = DNA
ttccgtttaatttcaactgta

SEQ ID NO: 212 - RNA, 21 nt, synthetic construct
  misc_feature 1..21: note = Synthetic
  source 1..21: mol_type = other RNA
  misc_feature 1..19: note = RNA
  misc_feature 20..21: note = DNA
ttgcgaaatatgtataatcca

SEQ ID NO: 213 - DNA, 21 bp, synthetic construct
  misc_feature 1..21: note = Synthetic
  source 1..21: mol_type = other DNA
  misc_feature 1..19: note = RNA
  misc_feature 20..21: note = DNA
tacgtttttaggtgaagcctg

SEQ ID NO: 214 - RNA, 19 nt, synthetic construct
  misc_feature 1..19: note = Synthetic
  source 1..19: mol_type = other RNA
gcagtgatgtcctggataa

SEQ ID NO: 215 - RNA, 19 nt, synthetic construct
  misc_feature 1..19: note = Synthetic
  source 1..19: mol_type = other RNA
ccaacgatgtgaagaaatt

SEQ ID NO: 216 - RNA, 19 nt, synthetic construct
  misc_feature 1..19: note = Synthetic
  source 1..19: mol_type = other RNA
aagctatgttcgccattaa

SEQ ID NO: 217 - DNA, 21 bp, synthetic construct
  misc_feature 1..21: note = Synthetic
  source 1..21: mol_type = other DNA
  misc_feature 1..19: note = RNA
  misc_feature 20..21: note = DNA
tgcatacctagattctaccat

SEQ ID NO: 218 - DNA, 21 bp, synthetic construct
  misc_feature 1..21: note = Synthetic
  source 1..21: mol_type = other DNA
  misc_feature 1..19: note = RNA
  misc_feature 20..21: note = DNA
tgattagtgattaccactgct

SEQ ID NO: 219 - DNA, 21 bp, synthetic construct
  misc_feature 1..21: note = Synthetic
  source 1..21: mol_type = other DNA
  misc_feature 1..19: note = RNA
  misc_feature 20..21: note = DNA
tgcttgataaaggagctgggt

SEQ ID NO: 220 - protein, 1043 aa, Homo sapiens
MRRFKRKHLTAIDCQHLARSHLAVTQPFGQRWTNRDPNHGLYPKPRTKRGSRGQGSQRCIPEFFLAGKQPCTNDMAKSNSVGQDSCQDSEGDMIFPAESSCALPQEGSAGPGSPGSAPPSRKRSWSSEEESNQATGTSRWDGVSKKAPRHHLSVPCTRPREARQEAEDSTSRLSAESGETDQDAGDVGPDPIPDSYYGLLGTLPCQEALSHICSLPSEVLRHVFAFLPVEDLYWNLSLVCHLWREIISDPLFIPWKKLYHRYLMNEEQAVSKVDGILSNCGIEKESDLCVLNLIRYTATTKCSPSVDPERVLWSLRDHPLLPEAEACVRQHLPDLYAAAGGVNIWALVAAVVLLSSSVNDIQRLLFCLRRPSSTVTMPDVTETLYCIAVLLYAMREKGINISNRIHYNIFYCLYLQENSCTQATKVKEEPSVWPGKKTIQLTHEQQLILNHKMEPLQVVKIMAFAGTGKTSTLVKYAEKWSQSRFLYVTFNKSIAKQAERVFPSNVICKTFHSMAYGHIGRKYQSKKKLNLFKLTPFMVNSVLAEGKGGFIRAKLVCKTLENFFASADEELTIDHVPIWCKNSQGQRVMVEQSEKLNGVLEASRLWDNMRKLGECTEEAHQMTHDGYLKLWQLSKPSLASFDAIFVDEAQDCTPAIMNIVLSQPCGKIFVGDPHQQIYTFRGAVNALFTVPHTHVFYLTQSFRFGVEIAYVGATILDVCKRVRKKTLVGGNHQSGIRGDAKGQVALLSRTNANVFDEAVRVTEGEFPSRIHLIGGIKSFGLDRIIDIWILLQPEEERRKQNLVIKDKFIRRWVHKEGFSGFKRYVTAAEDKELEAKIAVVEKYNIRIPELVQRIEKCHIEDLDFAEYILGTVHKAKGLEFDTVHVLDDFVKVPCARHNLPQLPHFRVESFSEDEWNLLYVAVTRAKKRLIMTKSLENILTLAGEYFLQAELTSNVLKTGVVRCCVGQCNNAIPVDTVLTMKKLPITYSNRKENKGGYLCHSCAEQRIGPLAFLTASPEQVRAMERTVENIVLPRHEALLFLVF

SEQ ID NO: 221 - protein, 579 aa, Homo sapiens
MAVFNQKSVSDMIKEFRKNWRALCNSERTTLCGADSMLLALQLSMAENNKQHSGEFTVSLSDVLLTWKYLLHEKLNLPVENMDVTDHYEDVRKIYDDFLKNSNMLDLIDVYQKCRALTSNCENYNTVSPSQLLDFLSGKQYAVGDETDLSIPTSPTSKYNRDNEKVQLLARKIIFSYLNLLVNSKNDLAVAYILNIPDRGLGREAFTDLKHAAREKQMSIFLVATSFIRTIELGGKGYAPPPSDPLRTHVKGLSNFINFIDKLDEILGEIPNPSIAGGQILSVIKMQLIKGQNSRDPFCKAIEEVAQDLDLRIKNIINSQEGVVALSTTDISPARPKSHAINHGTAYCGRDTVKALLVLLDEEAANAPTKNKAELLYDEENTIHHHGTSILTLFRSPTQVNNSIKPLRERICVSMQEKKIKMKQTLIRSQFACTYKDDYMISKDNWNNVNLASKPLCVLYMENDLSEGVNPSVGRSTIGTSFGNVHLDRSKNEKVSRKSTSQTGNKSSKRKQVDLDGENILCDNRNEPPQHKNAKIPKKSNDSQNRLYGKLAKVAKSNKCTAKDKLISGQAKLTQFFRL

SEQ ID NO: 222 - protein, 579 aa, Homo sapiens; identical to SEQ ID NO: 221

SEQ ID NO: 223 - protein, 498 aa, Homo sapiens
MDVTDHYEDVRKIYDDFLKNSNMLDLIDVYQKCRALTSNCENYNTVSPSQLLDFLSGKQYAVGDETDLSIPTSPTSKYNRDNEKVQLLARKIIFSYLNLLVNSKNDLAVAYILNIPDRGLGREAFTDLKHAAREKQMSIFLVATSFIRTIELGGKGYAPPPSDPLRTHVKGLSNFINFIDKLDEILGEIPNPSIAGGQILSVIKMQLIKGQNSRDPFCKAIEEVAQDLDLRIKNIINSQEGVVALSTTDISPARPKSHAINHGTAYCGRDTVKALLVLLDEEAANAPTKNKAELLYDEENTIHHHGTSILTLFRSPTQVNNSIKPLRERICVSMQEKKIKMKQTLIRSQFACTYKDDYMISKDNWNNVNLASKPLCVLYMENDLSEGVNPSVGRSTIGTSFGNVHLDRSKNEKVSRKSTSQTGNKSSKRKQVDLDGENILCDNRNEPPQHKNAKIPKKSNDSQNRLYGKLAKVAKSNKCTAKDKLISGQAKLTQFFRL

SEQ ID NO: 224 - protein, 172 aa, Homo sapiens
MAVFNQKSVSDMIKEFRKNWRALCNSERTTLCGADSMLLALQLSMAENNKQHSGEFTVSLSDVLLTWKYLLHEKLNLPVENMDVTDHYEDVRKIYDDFLKNSNMLDLIDVYQKCRALTSNCENYNTVSPSQLLDFLSGKQYAVGDETDLSIPTSPTSKYNRDNEKALPVLKR

SEQ ID NO: 225 - protein, 133 aa, Homo sapiens
MAVFNQKSVSDMIKEFRKNWRALCNSERTTLCGADSMLLALQLSMAENNKQHSGEFTVSLSDVLLTWKYLLHEKLNLPVENMDVTDHYEDVRKIYDDFLKNSNMLDLIDVYQKCRALTSNCENYNTVSPVSIF

SEQ ID NO: 226 - protein, 294 aa, Homo sapiens
MQLIKGQNSRDPFCKAIEEVAQDLDLRIKNIINSQEGVVALSTTDISPARPKSHAINHGTAYCGRDTVKALLVLLDEEAANAPTKNKAELLYDEENTIHHHGTSILTLFRSPTQVNNSIKPLRERICVSMQEKKIKMKQTLIRSQFACTYKDDYMISKDNWNNVNLASKPLCVLYMENDLSEGVNPSVGRSTIGTSFGNVHLDRSKNEKVSRKSTSQTGNKSSKRKQVDLDGENILCDNRNEPPQHKNAKIPKKSNDSQNRLYGKLAKVAKSNKCTAKDKLISGQAKLTQFFRL

SEQ ID NO: 227 - protein, 297 aa, Homo sapiens
MAVFNQKSVSDMIKEFRKNWRALCNSERTTLCGADSMLLALQLSMAENNKQHSGEFTVSLSDVLLTWKYLLHEKLNLPVENMDVTDHYEDVRKIYDDFLKNSNMLDLIDVYQKCRALTSNCENYNTVSPSQLLDFLSGKQYAVGDETDLSIPTSPTSKYNRDNEKVQLLARKIIFSYLNLLVNSKNDLAVAYILNIPDRGLGREAFTDLKHAAREKQMSIFLVATSFIRTIELGGKGYAPPPSDPLRTHVKGLSNFINFIDKLDEILGEIPNPRGCKSICWKINNWNEFWKCSSGQK

SEQ ID NO: 228 - protein, 302 aa, Homo sapiens
MAVFNQKSVSDMIKEFRKNWRALCNSERTTLCGADSMLLALQLSMAENNKQHSGEFTVSLSDVLLTWKYLLHEKLNLPVENMDVTDHYEDVRKIYDDFLKNSNMLDLIDVYQKCRALTSNCENYNTVSPSQLLDFLSGKQYAVGDETDLSIPTSPTSKYNRDNEKVQLLARKIIFSYLNLLVNSKNDLAVAYILNIPDRGLGREAFTDLKHAAREKQMSIFLVATSFIRTIELGGKGYAPPPSDPLRTHVKGLSNFINFIDKLDEILGEIPNPRSPTQVNNSIKPLRERICVSMQEKKIKRV

SEQ ID NO: 229 - protein, 1219 aa, Homo sapiens
MPKIVLNGVTVDFPFQPYKCQQEYMTKVLECLQQKVNGILESPTGTGKTLCLLCTTLAWREHLRDGISARKIAERAQGELFPDRALSSWGNAAAAAGDPIACYTDIPKIIYASRTHSQLTQVINELRNTSYRPKVCVLGSREQLCIHPEVKKQESNHLQIHLCRKKVASRSCHFYNNVEEKSLEQELASPILDIEDLVKSGSKHRVCPYYLSRNLKQQADIIFMPYNYLLDAKSRRAHNIDLKGTVVIFDEAHNVEKMCEESASFDLTPHDLASGLDVIDQVLEEQTKAAQQGEPHPEFSADSPSPGLNMELEDIAKLKMILLRLEGAIDAVELPGDDSGVTKPGSYIFELFAEAQITFQTKGCILDSLDQIIQHLAGRAGVFTNTAGLQKLADIIQIVFSVDPSEGSPGSPAGLGALQSYKVHIHPDAGHRRTAQRSDAWSTTAARKRGKVLSYWCFSPGHSMHELVRQGVRSLILTSGTLAPVSSFALEMQIPFPVCLENPHIIDKHQIWVGVVPRGPDGAQLSSAFDRRFSEECLSSLGKALGNIARVVPYGLLIFFPSYPVMEKSLEFWRARDLARKMEALKPLFVEPRSKGSFSETISAYYARVAAPGSTGATFLAVCRGKASEGLDFSDTNGRGVIVTGLPYPPRMDPRVVLKMQFLDEMKGQGGAGGQFLSGQEWYRQQASRAVNQAIGRVIRHRQDYGAVFLCDHRFAFADARAQLPSWVRPHVRVYDNFGHVIRDVAQFFRVAERTMPAPAPRATAPSVRGEDAVSEAKSPGPFFSTRKAKSLDLHVPSLKQRSSGSPAAGDPESSLCVEYEQEPVPARQRPRGLLAALEHSEQRAGSPGEEQAHSCSTLSLLSEKRPAEEPRGGRKKIRLVSHPEEPVAGAQTDRAKLFMVAVKQELSQANFATFTQALQDYKGSDDFAALAACLGPLFAEDPKKHNLLQGFYQFVRPHHKQQFEEVCIQLTGRGCGYRPEHSIPRRQRAQPVLDPTGRTAPDPKLTVSTAAAQQLDPQEHLNQGRPHLSPRPPPTGDPGSQPQWGSGVPRAGKQGQHAVSAYLADARRALGSAGCSQLLAALTAYKQDDDLDKVLAVLAALTTAKPEDFPLLHRFSMFVRPHHKQRFSQTCTDLTGRPYPGMEPPGPQEERLAVPPVLTHRAPQPGPSRSEKTGKTQSKISSFLRQRPAGTVGAGGEDAGPSQSSGPPHGPAASEWGL

SEQ ID NO: 230 - protein, 1243 aa, Homo sapiens
MPKIVLNGVTVDFPFQPYKCQQEYMTKVLECLQQKVNGILESPTGTGKTLCLLCTTLAWREHLRDGISARKIAERAQGELFPDRALSSWGNAAAAAGDPIACYTDIPKIIYASRTHSQLTQVINELRNTSYRSRCRATLWVLETAPPRPTVLSPTRPKVCVLGSREQLCIHPEVKKQESNHLQIHLCRKKVASRSCHFYNNVEEKSLEQELASPILDIEDLVKSGSKHRVCPYYLSRNLKQQADIIFMPYNYLLDAKSRRAHNIDLKGTVVIFDEAHNVEKMCEESASFDLTPHDLASGLDVIDQVLEEQTKAAQQGEPHPEFSADSPSPGLNMELEDIAKLKMILLRLEGAIDAVELPGDDSGVTKPGSYIFELFAEAQITFQTKGCILDSLDQIIQHLAGRAGVFTNTAGLQKLADIIQIVFSVDPSEGSPGSPAGLGALQSYKVHIHPDAGHRRTAQRSDAWSTTAARKRGKVLSYWCFSPGHSMHELVRQGVRSLILTSGTLAPVSSFALEMQIPFPVCLENPHIIDKHQIWVGVVPRGPDGAQLSSAFDRRFSEECLSSLGKALGNIARVVPYGLLIFFPSYPVMEKSLEFWRARDLARKMEALKPLFVEPRSKGSFSETISAYYARVAAPGSTGATFLAVCRGKASEGLDFSDTNGRGVIVTGLPYPPRMDPRVVLKMQFLDEMKGQGGAGGQFLSGQEWYRQQASRAVNQAIGRVIRHRQDYGAVFLCDHRFAFADARAQLPSWVRPHVRVYDNFGHVIRDVAQFFRVAERTMPAPAPRATAPSVRGEDAVSEAKSPGPFFSTRKAKSLDLHVPSLKQRSSGSPAAGDPESSLCVEYEQEPVPARQRPRGLLAALEHSEQRAGSPGEEQAHSCSTLSLLSEKRPAEEPRGGRKKIRLVSHPEEPVAGAQTDRAKLFMVAVKQELSQANFATFTQALQDYKGSDDFAALAACLGPLFAEDPKKHNLLQGFYQFVRPHHKQQFEEVCIQLTGRGCGYRPEHSIPRRQRAQPVLDPTGRTAPDPKLTVSTAAAQQLDPQEHLNQGRPHLSPRPPPTGDPGSQPQWGSGVPRAGKQGQHAVSAYLADARRALGSAGCSQLLAALTAYKQDDDLDKVLAVLAALTTAKPEDFPLLHRFSMFVRPHHKQRFSQTCTDLTGRPYPGMEPPGPQEERLAVPPVLTHRAPQPGPSRSEKTGKTQSKISSFLRQRPAGTVGAGGEDAGPSQSSGPPHGPAASEWGL

SEQ ID NO: 231 - protein, 1300 aa, Homo sapiens
MPKIVLNGVTVDFPFQPYKCQQEYMTKVLECLQQKVNGILESPTGTGKTLCLLCTTLAWREHLRDGISARKIAERAQGELFPDRALSSWGNAAAAAGDPIACYTDIPKIIYASRTHSQLTQVINELRNTSYRPKVCVLGSREQLCIHPEVKKQESNHLQIHLCRKKVASRSCHFYNNVEEKSLEQELASPILDIEDLVKSGSKHRVCPYYLSRNLKQQADIIFMPYNYLLDAKSRRAHNIDLKGTVVIFDEAHNVEKMCEESASFDLTPHDLASGLDVIDQVLEEQTKAAQQGEPHPEFSADSPSPGLNMELEDIAKLKMILLRLEGAIDAVELPGDDSGVTKPGSYIFELFAEAQITFQTKGCILDSLDQIIQHLAGRAGVFTNTAGLQKLADIIQIVFSVDPSEGSPGSPAGLGALQSYKVHIHPDAGHRRTAQRSDAWSTTAARKRGKVLSYWCFSPGHSMHELVRQGVRSLILTSGTLAPVSSFALEMQIPFPVCLENPHIIDKHQIWVGVVPRGPDGAQLSSAFDRRFSEECLSSLGKALGNIARVVPYGLLIFFPSYPVMEKSLEFWRARDLARKMEALKPLFVEPRSKGSFSETISAYYARVAAPGSTGATFLAVCRGKASEGLDFSDTNGRGVIVTGLPYPPRMDPRVVLKMQFLDEMKGQGGAGGQFLSGQEWYRQQASRAVNQAIGRVIRHRQDYGAVFLCDHRFAFADARAQLPSWVRPHVRVYDNFGHVIRDVAQFFRVAERTMPAPAPRATAPSVRGEDAVSEAKSPGPFFSTRKAKSLDLHVPSLKQRSSGSPAAGDPESSLCVEYEQEPVPARQRPRGLLAALEHSEQRAGSPGEEQAHSCSTLSLLSEKRPAEEPRGGRKKIRLVSHPEEPVAGAQTDRAKLFMVAVKQELSQANFATFTQALQDYKGSDDFAALAACLGPLFAEDPKKHNLLQGFYQFVRPHHKQQFEEVCIQLTGRGCGYRPEHSIPRRQRAQPVLDPTGRTAPDPKLTVSTAAAQQLDPQEHLNQGRPHLSPRPPPTGDPGSQPQWGSGVPRAGKQGQHAVSAYLADARRALGSAGCSQLLAALTAYKQDDDLDKVLAVLAALTTAKPEDFPLLHRFSMFVRPHHKQRFSQTCTDLTGRPYPGMEPPGPQEERLAVPPVLTHRAPQPGPSRSEKTGKTQSKISSFLRQRPAGTVGAGGEDAGPSQSSGPPHGPAASEWGEPHGRDIAGQQATGAPGGPLSAGCVCQGCGAEDVVPFQCPACDFQRCQACWQRHLQASRMCPACHTASRKQSVMQVFWPEPQ

SEQ ID NO: 232 - protein, 996 aa, Homo sapiens
MPYNYLLDAKSRRAHNIDLKGTVVIFDEAHNVEKMCEESASFDLTPHDLASGLDVIDQVLEEQTKAAQQGEPHPEFSADSPSPGLNMELEDIAKLKMILLRLEGAIDAVELPGDDSGVTKPGSYIFELFAEAQITFQTKGCILDSLDQIIQHLAGRAGVFTNTAGLQKLADIIQIVFSVDPSEGSPGSPAGLGALQSYKVHIHPDAGHRRTAQRSDAWSTTAARKRGKVLSYWCFSPGHSMHELVRQGVRSLILTSGTLAPVSSFALEMQIPFPVCLENPHIIDKHQIWVGVVPRGPDGAQLSSAFDRRFSEECLSSLGKALGNIARVVPYGLLIFFPSYPVMEKSLEFWRARDLARKMEALKPLFVEPRSKGSFSETISAYYARVAAPGSTGATFLAVCRGKASEGLDFSDTNGRGVIVTGLPYPPRMDPRVVLKMQFLDEMKGQGGAGGQFLSGQEWYRQQASRAVNQAIGRVIRHRQDYGAVFLCDHRFAFADARAQLPSWVRPHVRVYDNFGHVIRDVAQFFRVAERTMPAPAPRATAPSVRGEDAVSEAKSPGPFFSTRKAKSLDLHVPSLKQRSSGSPAAGDPESSLCVEYEQEPVPARQRPRGLLAALEHSEQRAGSPGEEQAHSCSTLSLLSEKRPAEEPRGGRKKIRLVSHPEEPVAGAQTDRAKLFMVAVKQELSQANFATFTQALQDYKGSDDFAALAACLGPLFAEDPKKHNLLQGFYQFVRPHHKQQFEEVCIQLTGRGCGYRPEHSIPRRQRAQPVLDPTGRTAPDPKLTVSTAAAQQLDPQEHLNQGRPHLSPRPPPTGDPGSQPQWGSGVPRAGKQGQHAVSAYLADARRALGSAGCSQLLAALTAYKQDDDLDKVLAVLAALTTAKPEDFPLLHRFSMFVRPHHKQRFSQTCTDLTGRPYPGMEPPGPQEERLAVPPVLTHRAPQPGPSRSEKTGKTQSKISSFLRQRPAGTVGAGGEDAGPSQSSGPPHGPAASEWGL

SEQ ID NO: 233 - protein, 719 aa, Homo sapiens
MPRRKKKVKEVSESRNLEKKDVETTSSVSVKRKRRLEDAFIVISDSDGEEPKEENGLQKTKTKQSNRAKCLAKRKIAQMTEEEQFALALKMSEQEAREVNSQEEEEEELLRKAIAESLNSCRPSDASATRSRPLATGPSSQSHQEKTTDSGLTEGIWQLVPPSLFKGSHISQGNEAEEREEPWDHTEKTEEEPVSGSSGSWDQSSQPVFENVNVKSFDRCTGHSAEHTQCGKPQESTGRGSAFLKAVQGSGDTSRHCLPTLADAKGLQDTGGTVNYFWGIPFCPDGVDPNQYTKVILCQLEVYQKSLKMAQRQLLNKKGFGEPVLPRPPSLIQNECGQGEQASEKNECISEDMGDEDKEERQESRASDWHSKTKDFQESSIKSLKEKLLLEEEPTTSHGQSSQGIVEETSEEGNSVPASQSVAALTSKRSLVLMPESSAEEITVCPETQLSSSETFDLEREVSPGSRDILDGVRIIMADKEVGNKEDAEKEVAISTFSSSNQVSCPLCDQCFPPTKIERHAMYCNGLMEEDTVLTRRQKEAKTKSDSGTAAQTSLDIDKNEKCYLCKSLVPFREYQCHVDSCLQLAKADQGDGPEGSGRACSTVEGKWQQRLKNPKEKGHSEGRLLSFLEQSEHKTSDADIKSSETGAFRVPSPGMEEAGCSREMQSSFTRRDLNESPVKSFVSISEATDCLVDFKKQVTVQPGSRTRTKAGRGRRRKF

SEQ ID NO: 234 - protein, 719 aa, Homo sapiens; identical to SEQ ID NO: 233

SEQ ID NO: 235 - protein, 553 aa, Homo sapiens
MPRRKKKVKEVSESRNLEKKDVETTSSVSVKRKRRLEDAFIVISDSDGEEPKEENGLQKTKTKQSNRAKCLAKRKIAQMTEEEQFALALKMSEQEAREVNSQEEEEEELLRKAIAESLNSCRPSDASATRSRPLATGPSSQSHQEKTTDSGLTEGIWQLVPPSLFKGSHISQGNEAEEREEPWDHTEKTEEEPVSGSSGSWDQSSQPVFENVNVKSFDRCTGHSAEHTQCGKPQSSQGIVEETSEEGNSVPASQSVAALTSKRSLVLMPESSAEEITVCPETQLSSSETFDLEREVSPGSRDILDGVRIIMADKEVGNKEDAEKEVAISTFSSSNQVSCPLCDQCFPPTKIERHAMYCNGLMEEDTVLTRRQKEAKTKSDSGTAAQTSLDIDKNEKCYLCKSLVPFREYQCHVDSCLQLAKADQGDGPEGSGRACSTVEGKWQQRLKNPKEKGHSEGRLLSFLEQSEHKTSDADIKSSETGAFRVPSPGMEEAGCSREMQSSFTRRDLNESPVKSFVSISEATDCLVDFKKQVTVQPGSRTRTKAGRGRRRKF

SEQ ID NO: 236 - protein, 641 aa, Homo sapiens
MTEEEQFALALKMSEQEAREVNSQEEEEEELLRKAIAESLNSCRPSDASATRSRPLATGPSSQSHQEKTTDSGLTEGIWQLVPPSLFKGSHISQGNEAEEREEPWDHTEKTEEEPVSGSSGSWDQSSQPVFENVNVKSFDRCTGHSAEHTQCGKPQESTGRGSAFLKAVQGSGDTSRHCLPTLADAKGLQDTGGTVNYFWGIPFCPDGVDPNQYTKVILCQLEVYQKSLKMAQRQLLNKKGFGEPVLPRPPSLIQNECGQGEQASEKNECISEDMGDEDKEERQESRASDWHSKTKDFQESSIKSLKEKLLLEEEPTTSHGQSSQGIVEETSEEGNSVPASQSVAALTSKRSLVLMPESSAEEITVCPETQLSSSETFDLEREVSPGSRDILDGVRIIMADKEVGNKEDAEKEVAISTFSSSNQVSCPLCDQCFPPTKIERHAMYCNGLMEEDTVLTRRQKEAKTKSDSGTAAQTSLDIDKNEKCYLCKSLVPFREYQCHVDSCLQLAKADQGDGPEGSGRACSTVEGKWQQRLKNPKEKGHSEGRLLSFLEQSEHKTSDADIKSSETGAFRVPSPGMEEAGCSREMQSSFTRRDLNESPVKSFVSISEATDCLVDFKKQVTVQPGSRTRTKAGRGRRRKF

SEQ ID NO: 237 - protein, 349 aa, Homo sapiens
MLPLPDLDLWPLDRLPSPIKRKPQTLGSLKSSQGIVEETSEEGNSVPASQSVAALTSKRSLVLMPESSAEEITVCPETQLSSSETFDLEREVSPGSRDILDGVRIIMADKEVGNKEDAEKEVAISTFSSSNQVSCPLCDQCFPPTKIERHAMYCNGLMEEDTVLTRRQKEAKTKSDSGTAAQTSLDIDKNEKCYLCKSLVPFREYQCHVDSCLQLAKADQGDGPEGSGRACSTVEGKWQQRLKNPKEKGHSEGRLLSFLEQSEHKTSDADIKSSETGAFRVPSPGMEEAGCSREMQSSFTRRDLNESPVKSFVSISEATDCLVDFKKQVTVQPGSRTRTKAGRGRRRKF

SEQ ID NO: 238 - protein, 152 aa, Homo sapiens
MPRRKKKVKEVSESRNLEKKDVETTSSVSVKRKRRLEDAFIVISDSDGEEPKEENGLQKTKTKQSNRAKCLAKRKIAQMTEEEQFALALKMSEQEAREVNSQEEEEEELLRKAIAESLNVNMPCCKSLWRLISYIFDFCGVVVALGTSCSHL

SEQ ID NO: 239 - RNA, 19 nt, synthetic construct
  misc_feature 1..19: note = Synthetic
  source 1..19: mol_type = other RNA
gaaaatgggttgcagaaaa

SEQ ID NO: 240 - RNA, 19 nt, synthetic construct
  misc_feature 1..19: note = Synthetic
  source 1..19: mol_type = other RNA
agaggcagctccttaataa

SEQ ID NO: 241 - RNA, 19 nt, synthetic construct
  misc_feature 1..19: note = Synthetic
  source 1..19: mol_type = other RNA
gcacaagacttcagatgca

SEQ ID NO: 242 - RNA, 19 nt, synthetic construct
  misc_feature 1..19: note = Synthetic
  source 1..19: mol_type = other RNA
ggacacatctaggcactgt

SEQ ID NO: 243 - RNA, 23 nt, synthetic construct
  misc_feature 1..23: note = Synthetic
  source 1..23: mol_type = other RNA
ttaatgctaatcgtgataggggt

SEQ ID NO: 244 - RNA, 23 nt, synthetic construct
  misc_feature 1..23: note = Synthetic
  source 1..23: mol_type = other RNA
acccctatcacgattagcattaa

SEQ ID NO: 245 - RNA, 22 nt, synthetic construct
  misc_feature 1..22: note = Synthetic
  source 1..22: mol_type = other RNA
ctcctacatattagcattaaca

SEQ ID NO: 246 - RNA, 22 nt, synthetic construct
  misc_feature 1..22: note = Synthetic
  source 1..22: mol_type = other RNA
tgttaatgctaatatgtaggag

SEQ ID NO: 247 - RNA, 22 nt, synthetic construct
  misc_feature 1..22: note = Synthetic
  source 1..22: mol_type = other RNA
tcagtaaatgtttattagatga

SEQ ID NO: 248 - RNA, 22 nt, synthetic construct
  misc_feature 1..22: note = Synthetic
  source 1..22: mol_type = other RNA
tcatctaataaacatttactga

SEQ ID NO: 249 - RNA, 22 nt, synthetic construct
  misc_feature 1..22: note = Synthetic
  source 1..22: mol_type = other RNA
tcagcaaacatttattgtgtgc

SEQ ID NO: 250 - RNA, 22 nt, synthetic construct
  misc_feature 1..22: note = Synthetic
  source 1..22: mol_type = other RNA
gcacacaataaatgtttgctga

SEQ ID NO: 251 - RNA, 23 nt, synthetic construct
  misc_feature 1..23: note = Synthetic
  source 1..23: mol_type = other RNA
agcagcattgtacagggctatca

SEQ ID NO: 252 - RNA, 23 nt, synthetic construct
  misc_feature 1..23: note = Synthetic
  source 1..23: mol_type = other RNA
tgatagccctgtacaatgctgct

SEQ ID NO: 253 - RNA, 23 nt, synthetic construct
  misc_feature 1..23: note = Synthetic
  source 1..23: mol_type = other RNA
aggatgagcaaagaaagtagatt

SEQ ID NO: 254 - RNA, 23 nt, synthetic construct
  misc_feature 1..23: note = Synthetic
  source 1..23: mol_type = other RNA
aatctactttctttgctcatcct

SEQ ID NO: 255 - RNA, 22 nt, synthetic construct
  misc_feature 1..22: note = Synthetic
  source 1..22: mol_type = other RNA
cggatgagcaaagaaagtggtt

SEQ ID NO: 256 - RNA, 22 nt, synthetic construct
  misc_feature 1..22: note = Synthetic
  source 1..22: mol_type = other RNA
aaccactttctttgctcatccg

SEQ ID NO: 257 - RNA, 22 nt, synthetic construct
  misc_feature 1..22: note = Synthetic
  source 1..22: mol_type = other RNA
cggatgagcaaagaaagtggtt

SEQ ID NO: 258 - RNA, 22 nt, synthetic construct
  misc_feature 1..22: note = Synthetic
  source 1..22: mol_type = other RNA
aaccactttctttgctcatccg

SEQ ID NO: 259 - RNA, 22 nt, synthetic construct
  misc_feature 1..22: note = Synthetic
  source 1..22: mol_type = other RNA
aaagttctgagacactccgact

SEQ ID NO: 260 - RNA, 22 nt, synthetic construct
  misc_feature 1..22: note = Synthetic
  source 1..22: mol_type = other RNA
agtcggagtgtctcagaacttt

SEQ ID NO: 261 - RNA, 22 nt, synthetic construct
  misc_feature 1..22: note = Synthetic
  source 1..22: mol_type = other RNA
tcagtgcactacagaactttgt

SEQ ID NO: 262 - RNA, 22 nt, synthetic construct
  misc_feature 1..22: note = Synthetic
  source 1..22: mol_type = other RNA
acaaagttctgtagtgcactga

SEQ ID NO: 263 - RNA, 22 nt, synthetic construct
  misc_feature 1..22: note = Synthetic
  source 1..22: mol_type = other RNA
tgggtctttgcgggcgagatga

SEQ ID NO: 264 - RNA, 22 nt, synthetic construct
  misc_feature 1..22: note = Synthetic
  source 1..22: mol_type = other RNA
tcatctcgcccgcaaagaccca

SEQ ID NO: 265 - RNA, 22 nt, synthetic construct
  misc_feature 1..22: note = Synthetic
  source 1..22: mol_type = other RNA
aactggcctacaaagtcccagt

SEQ ID NO: 266 - RNA, 22 nt, synthetic construct
  misc_feature 1..22: note = Synthetic
  source 1..22: mol_type = other RNA
actgggactttgtaggccagtt

SEQ ID NO: 267 - RNA, 19 nt, synthetic construct
  misc_feature 1..19: note = Synthetic
  source 1..19: mol_type = other RNA
gagcagacctttctcagta

SEQ ID NO: 268 - RNA, 19 nt, synthetic construct
  misc_feature 1..19: note = Synthetic
  source 1..19: mol_type = other RNA
gaagtgaacaagatcatta

SEQ ID NO: 269 - RNA, 19 nt, synthetic construct
  misc_feature 1..19: note = Synthetic
  source 1..19: mol_type = other RNA
caaccaagatgtatccttt

SEQ ID NO: 270 - RNA, 19 nt, synthetic construct
  misc_feature 1..19: note = Synthetic
  source 1..19: mol_type = other RNA
gaataggactgagtacggt

SEQ ID NO: 271 - RNA, 19 nt, synthetic construct
  misc_feature 1..19: note = Synthetic
  source 1..19: mol_type = other RNA
ggagctacctctagtatca

SEQ ID NO: 272 - RNA, 19 nt, synthetic construct
  misc_feature 1..19: note = Synthetic
  source 1..19: mol_type = other RNA
gaggttatattaaggaaga

SEQ ID NO: 273 - RNA, 19 nt, synthetic construct
  misc_feature 1..19: note = Synthetic
  source 1..19: mol_type = other RNA
gaacagaataggactgagt

SEQ ID NO: 274 - RNA, 19 nt, synthetic construct
  misc_feature 1..19: note = Synthetic
  source 1..19: mol_type = other RNA
gcacgttgcccaaagattc

SEQ ID NO: 275 - DNA, 21 bp, synthetic construct
  misc_feature 1..21: note = Synthetic
  source 1..21: mol_type = other DNA
  misc_feature 1..19: note = RNA
  misc_feature 20..21: note = DNA
ttacttgtaaaccttgtactt

SEQ ID NO: 276 - RNA, 21 nt, synthetic construct
  misc_feature 1..21: note = Synthetic
  source 1..21: mol_type = other RNA
  misc_feature 1..19: note = RNA
  misc_feature 20..21: note = DNA
aaatcgatcagacagatccag

SEQ ID NO: 277 - RNA, 21 nt, synthetic construct
  misc_feature 1..21: note = Synthetic
  source 1..21: mol_type = other RNA
  misc_feature 1..19: note = RNA
  misc_feature 20..21: note = DNA
tcttgttcacttcagacccaa

SEQ ID NO: 278 - protein, 609 aa, Homo sapiens
MSGWESYYKTEGDEEAEEEQEENLEASGDYKYSGRDSLIFLVDASKAMFESQSEDELTPFDMSIQCIQSVYISKIISSDRDLLAVVFYGTEKDKNSVNFKNIYVLQELDNPGAKRILELDQFKGQQGQKRFQDMMGHGSDYSLSEVLWVCANLFSDVQFKMSHKRIMLFTNEDNPHGNDSAKASRARTKAGDLRDTGIFLDLMHLKKPGGFDISLFYRDIISIAEDEDLRVHFEESSKLEDLLRKVRAKETRKRALSRLKLKLNKDIVISVGIYNLVQKALKPPPIKLYRETNEPVKTKTRTFNTSTGGLLLPSDTKRSQIYGSRQIILEKEETEELKRFDDPGLMLMGFKPLVLLKKHHYLRPSLFVYPEESLVIGSSTLFSALLIKCLEKEVAALCRYTPRRNIPPYFVALVPQEEELDDQKIQVTPPGFQLVFLPFADDKRKMPFTEKIMATPEQVGKMKAIVEKLRFTYRSDSFENPVLQQHFRNLEALALDLMEPEQAVDLTLPKVEAMNKRLGSLVDEFKELVYPPDYNPEGKVTKRKHDNEGSGSKRPKVEYSEEELKTHISKGTLGKFTVPMLKEACRAYGLKSGLKKQELLEALTKHFQD

SEQ ID NO: 279 - protein, 568 aa, Homo sapiens
MSGWESYYKTEGDEEAEEEQEENLEASGDYKYSGRDSLIFLVDASKAMFESQSEDELTPFDMSIQELDNPGAKRILELDQFKGQQGQKRFQDMMGHGSDYSLSEVLWVCANLFSDVQFKMSHKRIMLFTNEDNPHGNDSAKASRARTKAGDLRDTGIFLDLMHLKKPGGFDISLFYRDIISIAEDEDLRVHFEESSKLEDLLRKVRAKETRKRALSRLKLKLNKDIVISVGIYNLVQKALKPPPIKLYRETNEPVKTKTRTFNTSTGGLLLPSDTKRSQIYGSRQIILEKEETEELKRFDDPGLMLMGFKPLVLLKKHHYLRPSLFVYPEESLVIGSSTLFSALLIKCLEKEVAALCRYTPRRNIPPYFVALVPQEEELDDQKIQVTPPGFQLVFLPFADDKRKMPFTEKIMATPEQVGKMKAIVEKLRFTYRSDSFENPVLQQHFRNLEALALDLMEPEQAVDLTLPKVEAMNKRLGSLVDEFKELVYPPDYNPEGKVTKRKHDNEGSGSKRPKVEYSEEELKTHISKGTLGKFTVPMLKEACRAYGLKSGLKKQELLEALTKHFQD

SEQ ID NO: 280 - protein, 732 aa, Homo sapiens
MVRSGNKAAVVLCMDVGFTMSNSIPGIESPFEQAKKVITMFVQRQVFAENKDEIALVLFGTDGTDNPLSGGDQYQNITVHRHLMLPDFDLLEDIESKIQPGSQQADFLDALIVSMDVIQHETIGKKFEKRHIEIFTDLSSRFSKSQLDIIIHSLKKCDISLQFFLPFSLGKEDGSGDRGDGPFRLGGHGPSFPLKGITEQQKEGLEIVKMVMISLEGEDGLDEIYSFSESLRKLCVFKKIERHSIHWPCRLTIGSNLSIRIAAYKSILQERVKKTWTVVDAKTLKKEDIQKETVYCLNDDDETEVLKEDIIQGFRYGSDIVPFSKVDEEQMKYKSEGKCFSVLGFCKSSQVQRRFFMGNQVLKVFAARDDEAAAVALSSLIHALDDLDMVAIVRYAYDKRANPQVGVAFPHIKHNYECLVYVQLPFMEDLRQYMFSSLKNSKKYAPTEAQLNAVDALIDSMSLAKKDEKTDTLEDLFPTTKIPNPRFQRLFQCLLHRALHPREPLPPIQQHIWNMLNPPAEVTTKSQIPLSKIKTLFPLIEAKKKDQVTAQEIFQDNHEDGPTAKKLKTEQGGAHFSVSSLAEGSVTSVGSVNPAENFRVLVKQKKASFEEASNQLINHIEQFLDTNETPYFMKSIDCIRAFREEAIKFSEEQRFNNFLKALQEKVEIKQLNHFWEIVVQDGITLITKEEASGSSVTAEEAKKFLAPKDKPSGDTAAVFEEGGDVDDLLDMI

SEQ ID NO: 281 - protein, 4128 aa, Homo sapiens [sequence omitted]

SEQ ID NO: 282 - protein, 4097 aa, Homo sapiens
MAGSGAGVRCSLLRLQETLSAADRCGAALAGHQLIRGLGQECVLSSSPAVLALQTSLVFSRDFGLLVFVRKSLNSIEFRECREEILKFLCIFLEKMGQKIAPYSVEIKNTCTSVYTKDRAAKCKIPALDLLIKLLQTFRSSRLMDEFKIGELFSKFYGELALKKKIPDTVLEKVYELLGLLGEVHPSEMINNAENLFRAFLGELKTQMTSAVREPKLPVLAGCLKGLSSLLCNFTKSMEEDPQTSREIFNFVLKAIRPQIDLKRYAVPSAGLRLFALHASQFSTCLLDNYVSLFEVLLKWCAHTNVELKKAALSALESFLKQVSNMVAKNAEMHKNKLQYFMEQFYGIIRNVDSNNKELSIAIRGYGLFAGPCKVINAKDVDFMYVELIQRCKQMFLTQTDTGDDRVYQMPSFLQSVASVLLYLDTVPEVYTPVLEHLVVMQIDSFPQYSPKMQLVCCRAIVKVFLALAAKGPVLRNCISTVVHQGLIRICSKPVVLPKGPESESEDHRASGEVRTGKWKVPTYKDYVDLFRHLLSSDQMMDSILADEAFFSVNSSSESLNHLLYDEFVKSVLKIVEKLDLTLEIQTVGEQENGDEAPGVWMIPTSDPAANLHPAKPKDFSAFINLVEFCREILPEKQAEFFEPWVYSFSYELILQSTRLPLISGFYKLLSITVRNAKKIKYFEGVSPKSLKHSPEDPEKYSCFALFVKFGKEVAVKMKQYKDELLASCLTFLLSLPHNIIELDVRAYVPALQMAFKLGLSYTPLAEVGLNALEEWSIYIDRHVMQPYYKDILPCLDGYLKTSALSDETKNNWEVSALSRAAQKGFNKVVLKHLKKTKNLSSNEAISLEEIRIRVVQMLGSLGGQINKNLLTVTSSDEMMKSYVAWDREKRLSFAVPFREMKPVIFLDVFLPRVTELALTASDRQTKVAACELLHSMVMFMLGKATQMPEGGQGAPPMYQLYKRTFPVLLRLACDVDQVTRQLYEPLVMQLIHWFTNNKKFESQDTVALLEAILDGIVDPVDSTLRDFCGRCIREFLKWSIKQITPQQQEKSPVNTKSLFKRLYSLALHPNAFKRLGASLAFNNIYREFREEESLVEQFVFEALVIYMESLALAHADEKSLGTIQQCCDAIDHLCRIIEKKHVSLNKAKKRRLPRGFPPSASLCLLDLVKWLLAHCGRPQTECRHKSIELFYKFVPLLPGNRSPNLWLKDVLKEEGVSFLINTFEGGGCGQPSGILAQPTLLYLRGPFSLQATLCWLDLLLAALECYNTFIGERTVGALQVLGTEAQSSLLKAVAFFLESIAMHDIIAAEKCFGTGAAGNRTSPQEGERYNYSKCTVVVRIMEFTTTLLNTSPEGWKLLKKDLCNTHLMRVLVQTLCEPASIGFNIGDVQVMAHLPDVCVNLMKALKMSPYKDILETHLREKITAQSIEELCAVNLYGPDAQVDRSRLAAVVSACKQLHRAGLLHNILPSQSTDLHHSVGTELLSLVYKGIAPGDERQCLPSLDLSCKQLASGLLELAFAFGGLCERLVSLLLNPAVLSTASLGSSQGSVIHFSHGEYFYSLFSETINTELLKNLDLAVLELMQSSVDNTKMVSAVLNGMLDQSFRERANQKHQGLKLATTILQHWKKCDSWWAKDSPLETKMAVLALLAKILQIDSSVSFNTSHGSFPEVFTTYISLLADTKLDLHLKGQAVTLLPFFTSLTGGSLEELRRVLEQLIVAHFPMQSREFPPGTPRFNNYVDCMKKFLDALELSQSPMLLELMTEVLCREQQHVMEELFQSSFRRIARRGSCVTQVGLLESVYEMFRKDDPRLSFTRQSFVDRSLLTLLWHCSLDALREFFSTIVVDAIDVLKSRFTKLNESTFDTQITKKMGYYKILDVMYSRLPKDDVHAKESKINQVFHGSCITEGNELTKTLIKLCYDAFTENMAGENQLLERRRLYHCAAYNCAISVICCVFNELKFYQGFLFSEKPEKNLLIFENLIDLKRRYNFPVEVEVPMERKKKYIEIRKEAREAANGDSDGPSYMSSLSYLADSTLSEEMSQFDFSTGVQSYSYSSQDPRPATGRFRRREQRDPTVHDDVLELEMDELNRHECMAPLTALVKHMHRSLGPPQGEEDSVPRDLPSWMKFLHGKLGNPIVPLNIRLFLAKLVINTEEVFRPYAKHWLSPLLQLAASENNGGEGIHYMVVEIVATILSWTGLATPTGVPKDEVLANRLLNFLMKHVFHPKRAVFRHNLEIIKTLVECWKDCLSIPYRLIFEKFSGKDPNSKDNSVGIQLLGIVMANDLPPYDPQCGIQSSEYFQALVNNMSFVRYKEVYAAAAEVLGLILRYVMERKNILEESLCELVAKQLKQHQNTMEDKFIVCLNKVTKSFPPLADRFMNAVFFLLPKFHGVLKTLCLEVVLCRVEGMTELYFQLKSKDFVQVMRHRDDERQKVCLDIIYKMMPKLKPVELRELLNPVVEFVSHPSTTCREQMYNILMWIHDNYRDPESETDNDSQEIFKLAKDVLIQGLIDENPGLQLIIRNFWSHETRLPSNTLDRLLALNSLYSPKIEVHFLSLATNFLLEMTSMSPDYPNPMFEHPLSECEFQEYTIDSDWRFRSTVLTPMFVETQASQGTLQTRTQEGSLSARWPVAGQIRATQQQHDFTLTQTADGRSSFDWLTGSSTDPLVDHTSPSSDSLLFAHKRSERLQRAPLKSVGPDFGKKRLGLPGDEVDNKVKGAAGRTDLLRLRRRFMRDQEKLSLMYARKGVAEQKREKEIKSELKMKQDAQVVLYRSYRHGDLPDIQIKHSSLITPLQAVAQRDPIIAKQLFSSLFSGILKEMDKFKTLSEKNNITQKLLQDFNRFLNTTFSFFPPFVSCIQDISCQHAALLSLDPAAVSAGCLASLQQPVGIRLLEEALLRLLPAELPAKRVRGKARLPPDVLRWVELAKLYRSIGEYDVLRGIFTSEIGTKQITQSALLAEARSDYSEAAKQYDEALNKQDWVDGEPTEAEKDFWELASLDCYNHLAEWKSLEYCSTASIDSENPPDLNKIWSEPFYQETYLPYMIRSKLKLLLQGEADQSLLTFIDKAMHGELQKAILELHYSQELSLLYLLQDDVDRAKYYIQNGIQSFMQNYSSIDVLLHQSRLTKLQSVQALTEIQEFISFISKQGNLSSQVPLKRLLNTWTNRYPDAKMDPMNIWDDIITNRCFFLSKIEEKLTPLPEDNSMNVDQDGDPSDRMEVQEQEEDISSLIRSCKFSMKMKMIDSARKQNNFSLAMKLLKELHKESKTRDDWLVSWVQSYCRLSHCRSRSQGCSEQVLTVLKTVSLLDENNVSSYLSKNILAFRDQNILLGTTYRIIANALSSEPACLAEIEEDKARRILELSGSSSEDSEKVIAGLYQRAFQHLSEAVQAAEEEAQPPSWSCGPAAGVIDAYMTLADFCDQQLRKEEENASVIDSAELQAYPALVVEKMLKALKLNSNEARLKFPRLLQIIERYPEETLSLMTKEISSVPCWQFISWISHMVALLDKDQAVAVQHSVEEITDNYPQAIVYPFIISSESYSFKDTSTGHKNKEFVARIKSKLDQGGVIQDFINALDQLSNPELLFKDWSNDVRAELAKTPVNKKNIEKMYERMYAALGDPKAPGLGAFRRKFIQTFGKEFDKHFGKGGSKLLRMKLSDFNDITNMLLLKMNKDSKPPGNLKECSPWMSDFKVEFLRNELEIPGQYDGRGKPLPEYHVRIAGFDERVTVMASLRRPKRIIIRGHDEREHPFLVKGGEDLRQDQRVEQLFQVMNGILAQDSACSQRALQLRTYSVVPMTSSDPRAPPCEYKDWLTKMSGKHDVGAYMLMYKGANRTETVTSFRKRESKVPADLLKRAFVRMSTSPEAFLALRSHFASSHALICISHWILGIGDRHLNNFMVAMETGGVIGIDFGHAFGSATQFLPVPELMPFRLTRQFINLMLPMKETGLMYSIMVHALRAFRSDPGLLTNTMDVFVKEPSFDWKNFEQKMLKKGGSWIQEINVAEKNWYPRQKICYAKRKLAGANPAVITCDELLLGHEKAPAFRDYVAVARGSKDHNIRAQEPESGLSEETQVKCLMDQATDPNILGRTWEGWEPWM

SEQ ID NO: 283 - protein, 1972 aa, Homo sapiens
MDPTGSQLDSDFSQQDTPCLIIEDSQPESQVLEDDSGSHFSMLSRHLPNLQTHKENPVLDVVSNPEQTAGEERGDGNSGFNEHLKENKVADPVDSSNLDTCGSISQVIEQLPQPNRTSSVLGMSVESAPAVEEEKGEELEQKEKEKEEDTSGNTTHSLGAEDTASSQLGFGVLELSQSQDVEENTVPYEVDKEQLQSVTTNSGYTRLSDVDANTAIKHEEQSNEDIPIAEQSSKDIPVTAQPSKDVHVVKEQNPPPARSEDMPFSPKASVAAMEAKEQLSAQELMESGLQIQKSPEPEVLSTQEDLFDQSNKTVSSDGCSTPSREEGGCSLASTPATTLHLLQLSGQRSLVQDSLSTNSSDLVAPSPDAFRSTPFIVPSSPTEQEGRQDKPMDTSVLSEEGGEPFQKKLQSGEPVELENPPLLPESTVSPQASTPISQSTPVFPPGSLPIPSQPQFSHDIFIPSPSLEEQSNDGKKDGDMHSSSLTVECSKTSEIEPKNSPEDLGLSLTGDSCKLMLSTSEYSQSPKMESLSSHRIDEDGENTQIEDTEPMSPVLNSKFVPAENDSILMNPAQDGEVQLSQNDDKTKGDDTDTRDDISILATGCKGREETVAEDVCIDLTCDSGSQAVPSPATRSEALSSVLDQEEAMEIKEHHPEEGSSGSEVEEIPETPCESQGEELKEENMESVPLHLSLTETQSQGLCLQKEMPKKECSEAMEVETSVISIDSPQKLAILDQELEHKEQEAWEEATSEDSSVVIVDVKEPSPRVDVSCEPLEGVEKCSDSQSWEDIAPEIEPCAENRLDTKEEKSVEYEGDLKSGTAETEPVEQDSSQPSLPLVRADDPLRLDQELQQPQTQEKTSNSLTEDSKMANAKQLSSDAEAQKLGKPSAHASQSFCESSSETPFHFTLPKEGDIIPPLTGATPPLIGHLKLEPKRHSTPIGISNYPESTIATSDVMSESMVETHDPILGSGKGDSGAAPDVDDKLCLRMKLVSPETEASEESLQFNLEKPATGERKNGSTAVAESVASPQKTMSVLSCICEARQENEARSEDPPTTPIRGNLLHFPSSQGEEEKEKLEGDHTIRQSQQPMKPISPVKDPVSPASQKMVIQGPSSPQGEAMVTDVLEDQKEGRSTNKENPSKALIERPSQNNIGIQTMECSLRVPETVSAATQTIKNVCEQGTSTVDQNFGKQDATVQTERGSGEKPVSAPGDDTESLHSQGEEEFDMPQPPHGHVLHRHMRTIREVRTLVTRVITDVYYVDGTEVERKVTEETEEPIVECQECETEVSPSQTGGSSGDLGDISSFSSKASSLHRTSSGTSLSAMHSSGSSGKGAGPLRGKTSGTEPADFALPSSRGGPGKLSPRKGVSQTGTPVCEEDGDAGLGIRQGGKAPVTPRGRGRRGRPPSRTTGTRETAVPGPLGIEDISPNLSPDDKSFSRVVPRVPDSTRRTDVGAGALRRSDSPEIPFQAAAGPSDGLDASSPGNSFVGLRVVAKWSSNGYFYSGKITRDVGAGKYKLLFDDGYECDVLGKDILLCDPIPLDTEVTALSEDEYFSAGVVKGHRKESGELYYSIEKEGQRKWYKRMAVILSLEQGNRLREQYGLGPYEAVTPLTKAADISLDNLVEGKRKRRSNVSSPATPTASSSSSTTPTRKITESPRASMGVLSGKRKLITSEEERSPAKRGRKSATVKPGAVGAGEFVSPCESGDNTGEPSALEEQRGPLPLNKTLFLGYAFLLTMATTSDKLASRSKLPDGPTGSSEEEEEFLEIPPFNKQYTESQLRAGAGYILEDFNEAQCNTAYQCLLIADQHCRTRKYFLCLASGIPCVSHVWVHDSCHANQLQNYRNYLLPAGYSLEEQRILDWQPRENPFQNLKVLLVSDQQQNFLELWSEILMTGGAASVKQHHSSAHNKDIALGVFDVVVTDPSCPASVLKCAEALQLPVVSQEWVIQCLIVGERIGFKQHPKYKHDYVSH

SEQ ID NO: 284 - protein, 1977 aa, Homo sapiens
MPGEQMDPTGSQLDSDFSQQDTPCLIIEDSQPESQVLEDDSGSHFSMLSRHLPNLQTHKENPVLDVVSNPEQTAGEERGDGNSGFNEHLKENKVADPVDSSNLDTCGSISQVIEQLPQPNRTSSVLGMSVESAPAVEEEKGEELEQKEKEKEEDTSGNTTHSLGAEDTASSQLGFGVLELSQSQDVEENTVPYEVDKEQLQSVTTNSGYTRLSDVDANTAIKHEEQSNEDIPIAEQSSKDIPVTAQPSKDVHVVKEQNPPPARSEDMPFSPKASVAAMEAKEQLSAQELMESGLQIQKSPEPEVLSTQEDLFDQSNKTVSSDGCSTPSREEGGCSLASTPATTLHLLQLSGQRSLVQDSLSTNSSDLVAPSPDAFRSTPFIVPSSPTEQEGRQDKPMDTSVLSEEGGEPFQKKLQSGEPVELENPPLLPESTVSPQASTPISQSTPVFPPGSLPIPSQPQFSHDIFIPSPSLEEQSNDGKKDGDMHSSSLTVECSKTSEIEPKNSPEDLGLSLTGDSCKLMLSTSEYSQSPKMESLSSHRIDEDGENTQIEDTEPMSPVLNSKFVPAENDSILMNPAQDGEVQLSQNDDKTKGDDTDTRDDISILATGCKGREETVAEDVCIDLTCDSGSQAVPSPATRSEALSSVLDQEEAMEIKEHHPEEGSSGSEVEEIPETPCESQGEELKEENMESVPLHLSLTETQSQGLCLQKEMPKKECSEAMEVETSVISIDSPQKLAILDQELEHKEQEAWEEATSEDSSVVIVDVKEPSPRVDVSCEPLEGVEKCSDSQSWEDIAPEIEPCAENRLDTKEEKSVEYEGDLKSGTAETEPVEQDSSQPSLPLVRADDPLRLDQELQQPQTQEKTSNSLTEDSKMANAKQLSSDAEAQKLGKPSAHASQSFCESSSETPFHFTLPKEGDIIPPLTGATPPLIGHLKLEPKRHSTPIGISNYPESTIATSDVMSESMVETHDPILGSGKGDSGAAPDVDDKLCLRMKLVSPETEASEESLQFNLEKPATGERKNGSTAVAESVASPQKTMSVLSCICEARQENEARSEDPPTTPIRGNLLHFPSSQGEEEKEKLEGDHTIRQSQQPMKPISPVKDPVSPASQKMVIQGPSSPQGEAMVTDVLEDQKEGRSTNKENPSKALIERPSQNNIGIQTMECSLRVPETVSAATQTIKNVCEQGTSTVDQNFGKQDATVQTERGSGEKPVSAPGDDTESLHSQGEEEFDMPQPPHGHVLHRHMRTIREVRTLVTRVITDVYYVDGTEVERKVTEETEEPIVECQECETEVSPSQTGGSSGDLGDISSFSSKASSLHRTSSGTSLSAMHSSGSSGKGAGPLRGKTSGTEPADFALPSSRGGPGKLSPRKGVSQTGTPVCEEDGDAGLGIRQGGKAPVTPRGRGRRGRPPSRTTGTRETAVPGPLGIEDISPNLSPDDKSFSRVVPRVPDSTRRTDVGAGALRRSDSPEIPFQAAAGPSDGLDASSPGNSFVGLRVVAKWSSNGYFYSGKITRDVGAGKYKLLFDDGYECDVLGKDILLCDPIPLDTEVTALSEDEYFSAGVVKGHRKESGELYYSIEKEGQRKWYKRMAVILSLEQGNRLREQYGLGPYEAVTPLTKAADISLDNLVEGKRKRRSNVSSPATPTASSSSSTTPTRKITESPRASMGVLSGKRKLITSEEERSPAKRGRKSATVKPGAVGAGEFVSPCESGDNTGEPSALEEQRGPLPLNKTLFLGYAFLLTMATTSDKLASRSKLPDGPTGSSEEEEEFLEIPPFNKQYTESQLRAGAGYILEDFNEAQCNTAYQCLLIADQHCRTRKYFLCLASGIPCVSHVWVHDSCHANQLQNYRNYLLPAGYSLEEQRILDWQPRENPFQNLKVLLVSDQQQNFLELWSEILMTGGAASVKQHHSSAHNKDIALGVFDVVVTDPSCPASVLKCAEALQLPVVSQEWVIQCLIVGERIGFKQHPKYKHDYVSH

SEQ ID NO: 285 - protein, 1975 aa, Homo sapiens
MPGEQMDPTGSQLDSDFSQQDTPCLIIEDSQPESQVLEDDSGSHFSMLSRHLPNLQTHKENPVLDVVSNPEQTAGEERGDGNSGFNEHLKENKVADPVDSSNLDTCGSISQVIEQLPQPNRTSSVLGMSVESAPAVEEEKGEELEQKEKEKEEDTSGNTTHSLGAEDTASSQLGFGVLELSQSQDVEENTVPYEVDKEQLQSVTTNSGYTRLSDVDANTAIKHEEQSNEDIPIAEQSSKDIPVTAQPSKDVHVVKEQNPPPARSEDMPFSPKASVAAMEAKEQLSAQELMESGLQIQKSPEPEVLSTQEDLFDQSNKTVSSDGCSTPSREEGGCSLASTPATTLHLLQLSGQRSLVQDSLSTNSSDLVAPSPDAFRSTPFIVPSSPTEQEGRQDKPMDTSVLSEEGGEPFQKKLQSGEPVELENPPLLPESTVSPQASTPISQSTPVFPPGSLPIPSQPQFSHDIFIPSPSLEEQSNDGKKDGDMHSSSLTVECSKTSEIEPKNSPEDLGLSLTGDSCKLMLSTSEYSQSPKMESLSSHRIDEDGENTQIEDTEPMSPVLNSKFVPAENDSILMNPAQDGEVQLSQNDDKTKGDDTDTRDDISILATGCKGREETVAEDVCIDLTCDSGSQAVPSPATRSEALSSVLDQEEAMEIKEHHPEEGSSGSEVEEIPETPCESQGEELKEENMESVPLHLSLTETQSQGLCLQKEMPKKECSEAMEVETSVISIDSPQKLAILDQELEHKEQEAWEEATSEDSSVVIVDVKEPSPRVDVSCEPLEGVEKCSDSQSWEDIAPEIEPCAENRLDTKEEKSVEYEGDLKSGTAETEPVEQDSSQPSLPLVRADDPLRLDQELQQPQTQEKTSNSLTEDSKMANAKQLSSDAEAQKLGKPSAHASQSFCESSSETPFHFTLPKEGDIIPPLTGATPPLIGHLKLEPKRHSTPIGISNYPESTIATSDVMSESMVETHDPILGSGKGDSGAAPDVDDKLCLRMKLVSPETEASEESLQFNLEKPATGERKNGSTAVAESVASPQKTMSVLSCICEARQENEARSEDPPTTPIRGNLLHFPSSQGEEEKEKLEGDHTIRQSQQPMKPISPVKDPVSPASQKMVIQGPSSPQGEAMVTDVLEDQKEGRSTNKENPSKALIERPSQNNIGIQTMECSLRVPETVSAATQTIKNVCEQGTSTVDQNFGKQDATVQTERGSGEKPVSAPGDDTESLHSQGEEEFDMPQPPHGHVLHRHMRTIREVRTLVTRVITDVYYVDGTEVERKVTEETEEPIVECQECETEVSPSQTGGSSGDLGDISSFSSKASSLHRTSSGTSLSAMHSSGSSGKGAGPLRGKTSGTEPADFALPSSRGGPGKLSPRKGVSQTGTPVCEEDGDAGLGIRQGGKAPVTPRGRGRRGRPPSRTTGTRETAVPGPLGIEDISPNLSPDDKSFSRVVPRVPDSTRRTDVGAGALRRSDSPEIPFQAAAGPSDGLDASSPGNSFVGLRVVAKWSSNGYFYSGKITRDVGAGKYKLLFDDGYECDVLGKDILLCDPIPLDTEVTALSEDEYFSAGVVKGHRKESGELYYSIEKEGQRKWYKRMAVILSLEQGNRLREQYGLGPYEAVTPLTKAADISLDNLVEGKRKRRSNVSSPATPTASSSSSTTPTRKITESPRASMGVLSGKRKLITSEEERSPAKRGRKSATVKPVGAGEFVSPCESGDNTGEPSALEEQRGPLPLNKTLFLGYAFLLTMATTSDKLASRSKLPDGPTGSSEEEEEFLEIPPFNKQYTESQLRAGAGYILEDFNEAQCNTAYQCLLIADQHCRTRKYFLCLASGIPCVSHVWVHDSCHANQLQNYRNYLLPAGYSLEEQRILDWQPRENPFQNLKVLLVSDQQQNFLELWSEILMTGGAASVKQHHSSAHNKDIALGVFDVVVTDPSCPASVLKCAEALQLPVVSQEWVIQCLIVGERIGFKQHPKYKHDYVSH

SEQ ID NO: 286 - protein, 336 aa, Homo sapiens
MERKISRIHLVSEPSITHFLQVSWEKTLESGFVITLTDGHSAWTGTVSESEISQEADDMAMEKGKYVGELRKALLSGAGPADVYTFNFSKESCYFFFEKNLKDVSFRLGSFNLEKVENPAEVIRELICYCLDTIAENQAKNEHLQKENERLLRDWNDVQGRFEKCVSAKEALETDLYKRFILVLNEKKTKIRSLHNKLLNAAQEREKDIKQEGETAICSEMTADRDPVYDESTDEESENQTDLSGLASAAVSKDDSIISSLDVTDIAPSRKRRQRMQRNLGTEPKMAPQENQLQEKENSRPDSSLPETSKKEHISAENMSLETLRNSSPEDLFDEI

SEQ ID NO: 287 - protein, 334 aa, Homo sapiens
MERKISRIHLVSEPSITHFLQVSWEKTLESGFVITLTDGHSAWTGTVSESEISQEADDMAMEKGKYVGELRKALLSGAGPADVYTFNFSKESCYFFFEKNLKDVSFRLGSFNLEKVENPAEVIRELICYCLDTIAENQAKNEHLQKENERLLRDWNDVQGRFEKCVSAKEALETDLYKRFILVLNEKKTKIRSLHNKLLNAAQEREKDIKQEGETAICSEMTADRDPVYDESTDEESENQTDLSGLASAAVSKDDSIISSLDVTDIAPSRKRRQRMQRNLGTEPKMAPQENQLQEKEKPDSSLPETSKKEHISAENMSLETLRNSSPEDLFDEI

SEQ ID NO: 288 - protein, 310 aa, Homo sapiens
MERKISRIHLVSEPSITHFLQVSWEKTLESGFVITLTDGHSAWTGTVSESEISQEADDMAMEKGKYVGELRKALLSGAGPADVYTFNFSKESCYFFFEKNLKDVSFRLGSFNLEKVENPAEVIRELICYCLDTIAENQAKNEHLQKENERLLRDWNDVQGRFEKCVSAKEALETDLYKRFILVLNEKKTKIRSLHNKLLNAAQEREKDIKQEGETAICSEMTADRDPVYDESTDEESENQTDLSGLASAAVSKDDSIISSLDVTDIAPSRKRRQRMQRNLGTEPKMAPQENQLQEKEKGRKKETSEKEAV

SEQ ID NO: 289 - protein, 911 aa, Homo sapiens
MAASQTSQTVASHVPFADLCSTLERIQKSKGRAEKIRHFREFLDSWRKFHDALHKNHKDVTDSFYPAMRLILPQLERERMAYGIKETMLAKLYIELLNLPRDGKDALKLLNYRTPTGTHGDAGDFAMIAYFVLKPRCLQKGSLTIQQVNDLLDSIASNNSAKRKDLIKKSLLQLITQSSALEQKWLIRMIIKDLKLGVSQQTIFSVFHNDAAELHNVTTDLEKVCRQLHDPSVGLSDISITLFSAFKPMLAAIADIEHIEKDMKHQSFYIETKLDGERMQMHKDGDVYKYFSRNGYNYTDQFGASPTEGSLTPFIHNAFKADIQICILDGEMMAYNPNTQTFMQKGTKFDIKRMVEDSDLQTCYCVFDVLMVNNKKLGHETLRKRYEILSSIFTPIPGRIEIVQKTQAHTKNEVIDALNEAIDKREEGIMVKQPLSIYKPDKRGEGWLKIKPEYVSGLMDELDILIVGGYWGKGSRGGMMSHFLCAVAEKPPPGEKPSVFHTLSRVGSGCTMKELYDLGLKLAKYWKPFHRKAPPSSILCGTEKPEVYIEPCNSVIVQIKAAEIVPSDMYKTGCTLRFPRIEKIRDDKEWHECMTLDDLEQLRGKASGKLASKHLYIGGDDEPQEKKRKAAPKMKKVIGIIEHLKAPNLTNVNKISNIFEDVEFCVMSGTDSQPKPDLENRIAEFGGYIVQNPGPDTYCVIAGSENIRVKNIILSNKHDVVKPAWLLECFKTKSFVPWQPRFMIHMCPSTKEHFAREYDCYGDSYFIDTDLNQLKEVFSGIKNSNEQTPEEMASLIADLEYRYSWDCSPLSMFRRHTVYLDSYAVINDLSTKNEGTRLAIKALELRFHGAKVVSCLAEGVSHVIIGEDHSRVADFKAFRRTFKRKFKILKESWVTDSIDKCELQEENQYLI

SEQ ID NO: 290 - protein, 299 aa, Homo sapiens
MEELEQGLLMQPWAWLQLAENSLLAKVFITKQGYALLVSDLQQVWHEQVDTSVVSQRAKELNKRLTAPPAAFLCHLDNLLRPLLKDAAHPSEATFSCDCVADALILRVRSELSGLPFYWNFHCMLASPSLVSQHLIRPLMGMSLALQCQVRELATLLHMKDLEIQDYQESGATLIRDRLKTEPFEENSFLEQFMIEKLPEACSIGDGKPFVMNLQDLYMAVTTQEVQVGQKHQGAGDPHTSNSASLQGIDSQCVNQPEQLVSSAPTLSAPEKESTGTSGPLQRPQLSKVKRKKPRGLFS

SEQ ID NO: 291 - protein, 316 aa, Homo sapiens
MEELEQGLLMQPWAWLQLAENSLLAKVFITKQGYALLVSDLQQVWHEQVDTSVVSQRAKELNKRLTAPPAAFLCHLDNLLRPLLKDAAHPSEATFSCDCVADALILRVRSELSGLPFYWNFHCMLASPSLVSQHLIRPLMGMSLALQCQVRELATLLHMKDLEIQDYQESGATLIRDRLKTEPFEENSFLEQFMIEKLPEACSIGDGKPFVMNLQDLYMAVTTQEVQVGQKHQGAGDPHTSNSASLQGIDSQCVNQPEQLVSSAPTLSAPEKESTALCRDLSCQRSRGRSQGVSSVNLLWPQLLRMDLENSFQASP

SEQ ID NO: 292 - protein, 692 aa, Homo sapiens
MSSFEGQMAEYPTISIDRFDRENLRARAYFLSHCHKDHMKGLRAPTLKRRLECSLKVYLYCSPVTKELLLTSPKYRFWKKRIISIEIETPTQISLVDEASGEKEEIVVTLLPAGHCPGSVMFLFQGNNGTVLYTGDFRLAQGEAARMELLHSGGRVKDIQSVYLDTTFCDPRFYQIPSREECLSGVLELVRSWITRSPYHVVWLNCKAAYGYEYLFTNLSEELGVQVHVNKLDMFRNMPEILHHLTTDRNTQIHACRHPKAEEYFQWSKLPCGITSRNRIPLHIISIKPSTMWFGERSRKTNVIVRTGESSYRACFSFHSSYSEIKDFLSYLCPVNAYPNVIPVGTTMDKVVEILKPLCRSSQSTEPKYKPLGKLKRARTVHRDSEEEDDYLFDDPLPIPLRHKVPYPETFHPEVFSMTAVSEKQPEKLRQTPGCCRAECMQSSRFTNFVDCEESNSESEEEVGIPASLQGDLGSVLHLQKADGDVPQWEVFFKRNDEITDESLENFPSSTVAGGSQSPKLFSDSDGESTHISSQNSSQSTHITEQGSQGWDSQSDTVLLSSQERNSGDITSLDKADYRPTIKENIPASLMEQNVICPKDTYSDLKSRDKDVTIVPSTGEPTTLSSETHIPEEKSLLNLSTNADSQSSSDFEVPSTPEAELPKREHLQYLYEKLATGESIAVKKRKCSLLDT

SEQ ID NO: 293 - protein, 577 aa, Homo sapiens
MKHQERFLFQGNNGTVLYTGDFRLAQGEAARMELLHSGGRVKDIQSVYLDTTFCDPRFYQIPSREECLSGVLELVRSWITRSPYHVVWLNCKAAYGYEYLFTNLSEELGVQVHVNKLDMFRNMPEILHHLTTDRNTQIHACRHPKAEEYFQWSKLPCGITSRNRIPLHIISIKPSTMWFGERSRKTNVIVRTGESSYRACFSFHSSYSEIKDFLSYLCPVNAYPNVIPVGTTMDKVVEILKPLCRSSQSTEPKYKPLGKLKRARTVHRDSEEEDDYLFDDPLPIPLRHKVPYPETFHPEVFSMTAVSEKQPEKLRQTPGCCRAECMQSSRFTNFVDCEESNSESEEEVGIPASLQGDLGSVLHLQKADGDVPQWEVFFKRNDEITDESLENFPSSTVAGGSQSPKLFSDSDGESTHISSQNSSQSTHITEQGSQGWDSQSDTVLLSSQERNSGDITSLDKADYRPTIKENIPASLMEQNVICPKDTYSDLKSRDKDVTIVPSTGEPTTLSSETHIPEEKSLLNLSTNADSQSSSDFEVPSTPEAELPKREHLQYLYEKLATGESIAVKKRKCSLLDT

SEQ ID NO: 294 - protein, 572 aa, Homo sapiens
MFLFQGNNGTVLYTGDFRLAQGEAARMELLHSGGRVKDIQSVYLDTTFCDPRFYQIPSREECLSGVLELVRSWITRSPYHVVWLNCKAAYGYEYLFTNLSEELGVQVHVNKLDMFRNMPEILHHLTTDRNTQIHACRHPKAEEYFQWSKLPCGITSRNRIPLHIISIKPSTMWFGERSRKTNVIVRTGESSYRACFSFHSSYSEIKDFLSYLCPVNAYPNVIPVGTTMDKVVEILKPLCRSSQSTEPKYKPLGKLKRARTVHRDSEEEDDYLFDDPLPIPLRHKVPYPETFHPEVFSMTAVSEKQPEKLRQTPGCCRAECMQSSRFTNFVDCEESNSESEEEVGIPASLQGDLGSVLHLQKADGDVPQWEVFFKRNDEITDESLENFPSSTVAGGSQSPKLFSDSDGESTHISSQNSSQSTHITEQGSQGWDSQSDTVLLSSQERNSGDITSLDKADYRPTIKENIPASLMEQNVICPKDTYSDLKSRDKDVTIVPSTGEPTTLSSETHIPEEKSLLNLSTNADSQSSSDFEVPSTPEAELPKREHLQYLYEKLATGESIAVKKRKCSLLDT

SEQ ID NO: 295 - protein, 511 aa, Homo sapiens
MSGGFELQPRDGGPRVALAPGETVIGRGPLLGITDKRVSRRHAILEVAGGQLRIKPIHTNPCFYQSSEKSQLLPLKPNLWCYLNPGDSFSLLVDKYIFRILSIPSEVEMQCTLRNSQVLDEDNILNETPKSPVINLPHETTGASQLEGSTEIAKTQMTPTNSVSFLGENRDCNKQQPILAERKRILPTWMLAEHLSDQNLSVPAISGGNVIQGSGKEEICKDKSQLNTTQQGRRQLISSGSSENTSAEQDTGEECKNTDQEESTISSKEMPQSFSAITLSNTEMNNIKTNAQRNKLPIEELGKVSKHKIATKRTPHKEDEAMSCSENCSSAQGDSLQDESQGSHSESSSNPSNPETLHAKATDSVLQGSEGNKVKRTSCMYGANCYRKNPVHFQHFSHPGDSDYGGVQIVGQDETDDRPECPYGPSCYRKNPQHKIEYRHNTLPVRNVLDEDNDNVGQPNEYDLNDSFLDDEEEDYEPTDEDSDWEPGKEDEEKEDVEELLKEAKRFMKRK

SEQ ID NO: 296 - protein, 521 aa, Homo sapiens
MGEVEAPGRLWLESPPGGAPPIFLPSDGQALVLGRGPLTQVTDRKCSRTQVELVADPETRTVAVKQLGVNPSTTGTQELKPGLEGSLGVGDTLYLVNGLHPLTLRWEETRTPESQPDTPPGTPLVSQDEKRDAELPKKRMRKSNPGWENLEKLLVFTAAGVKPQGKVAGFDLDGTLITTRSGKVFPTGPSDWRILYPEIPRKLRELEAEGYKLVIFTNQMSIGRGKLPAEEFKAKVEAVVEKLGVPFQVLVATHAGLYRKPVTGMWDHLQEQANDGTPISIGDSIFVGDAAGRPANWAPGRKKKDFSCADRLFALNLGLPFATPEEFFLKWPAAGFELPAFDPRTVSRSGPLCLPESRALLSASPEVVVAVGFPGAGKSTFLKKHLVSAGYVHVNRDTLGSWQRCVTTCETALKQGKRVAIDNTNPDAASRARYVQCARAAGVPCRCFLFTATLEQARHNNRFREMTDSSHIPVSDMVMYGYRKQFEAPTLAEGFSAILEIPFRLWVEPRLGRLYCQFSEG

SEQ ID NO: 297 - protein, 482 aa, Homo sapiens
MQILTPPLQSSVELVADPETRTVAVKQLGVNPSTTGTQELKPGLEGSLGVGDTLYLVNGLHPLTLRWEETRTPESQPDTPPGTPLVSQDEKRDAELPKKRMRKSNPGWENLEKLLVFTAAGVKPQGKVAGFDLDGTLITTRSGKVFPTGPSDWRILYPEIPRKLRELEAEGYKLVIFTNQMSIGRGKLPAEEFKAKVEAVVEKLGVPFQVLVATHAGLYRKPVTGMWDHLQEQANDGTPISIGDSIFVGDAAGRPANWAPGRKKKDFSCADRLFALNLGLPFATPEEFFLKWPAAGFELPAFDPRTVSRSGPLCLPESRALLSASPEVVVAVGFPGAGKSTFLKKHLVSAGYVHVNRDTLGSWQRCVTTCETALKQGKRVAIDNTNPDAASRARYVQCARAAGVPCRCFLFTATLEQARHNNRFREMTDSSHIPVSDMVMYGYRKQFEAPTLAEGFSAILEIPFRLWVEPRLGRLYCQFSEG

SEQ ID NO: 298 - protein, 2472 aa, Homo sapiens
MTARGQSPLAPLLETLEDPSASHGGQTDAYLTLTSRMTGEEGKEVITEIEKKLPRLYKVLKTHISSQNSELSSAALQALGFCLYNPKITSELSEANALELLSKLNDTIKNSDKNVRTRALWVISKQTFPSEVVGKMVSSIIDSLEILFNKGETHSAVVDFEALNVIVRLIEQAPIQMGEEAVRWAKLVIPLVVHSAQKVHLRGATALEMGMPLLLQKQQEIASITEQLMTTKLISELQKLFMSKNETYVLKLWPLFVKLLGRTLHRSGSFINSLLQLEELGFRSGAPMIKKIAFIAWKSLIDNFALNPDILCSAKRLKLLMQPLSSIHVRTETLALTKLEVWWYLLMRLGPHLPANFEQVCVPLIQSTISIDSNASPQGNSCHVATSPGLNPMTPVHKGASSPYGAPGTPRMNLSSNLGGMATIPSIQLLGLEMLLHFLLGPEALSFAKQNKLVLSLEPLEHPLISSPSFFSKHANTLITAVHDSFVAVGKDAPDVVVSAIWKELISLVKSVTESGNKKEKPGSEVLTLLLKSLESIVKSEVFPVSKTLVLMEITIKGLPQKVLGSPAYQVANMDILNGTPALFLIQLIFNNFLECGVSDERFFLSLESLVGCVLSGPTSPLAFSDSVLNVINQNAKQLENKEHLWKMWSVIVTPLTELINQTNEVNQGDALEHNFSAIYGALTLPVNHIFSEQRFPVATMKTLLRTWSELYRAFARCAALVATAEENLCCEELSSKIMSSLEDEGFSNLLFVDRIIYIITVMVDCIDFSPYNIKYQPKVKSPQRPSDWSKKKNEPLGKLTSLFKLIVKVIYSFHTLSFKEAHSDTLFTIGNSITGIISSVLGHISLPSMIRKIFATLTRPLALFYENSKLDEVPKVYSCLNNKLEKLLGEIIACLQFSYTGTYDSELLEQLSPLLCIIFLHKNKQIRKQSAQFWNATFAKVMMLVYPEELKPVLTQAKQKFLLLLPGLETVEMMEESSGPYSDGTENSQLNVKISGMERKSNGKRDSFLAQTKNKKENMKPAAKLKLESSSLKVKGEILLEEEKSTDFVFIPPEGKDAKERILTDHQKEVLKTKRCDIPAMYNNLDVSQDTLFTQYSQEEPMEIPTLTRKPKEDSKMMITEEQMDSDIVIPQDVTEDCGMAEHLEKSSLSNNECGSLDKTSPEMSNSNNDERKKALISSRKTSTECASSTENSFVVSSSSVSNTTVAGTPPYPTSRRQTFITLEKFDGSENRPFSPSPLNNISSTVTVKNNQETMIKTDFLPKAKQREGTFSKSDSEKIVNGTKRSSRRAGKAEQTGNKRSKPLMRSEPEKNTEESVEGIVVLENNPPGLLNQTECVSDNQVHLSESTMEHDNTKLKAATVENAVLLETNTVEEKNVEINLESKENTPPVVISADQMVNEDSQVQITPNQKTLRRSSRRRSEVVESTTESQDKENSHQKKERRKEEEKPLQKSPLHIKDDVLPKQKLIAEQTLQENLIEKGSNLHEKTLGETSANAETEQNKKKADPENIKSEGDGTQDIVDKSSEKLVRGRTRYQTRRASQGLLSSIENSESDSSEAKEEGSRKKRSGKWKNKSNESVDIQDQEEKVVKQECIKAENQSHDYKATSEEDVSIKSPICEKQDESNTVICQDSTVTSDLLQVPDDLPNVCEEKNETSKYAEYSFTSLPVPESNLRTRNAIKRLHKRDSFDNCSLGESSKIGISDISSLSEKTFQTLECQHKRSRRVRRSKGCDCCGEKSQPQEKSLIGLKNTENNDVEISETKKADVQAPVSPSETSQANPYSEGQFLDEHHSVNFHLGLKEDNDTINDSLIVSETKSKENTMQESLPSGIVNFREEICDMDSSEAMSLESQESPNENFKTVGPCLGDSKNVSQESLETKEEKPEETPKMELSLENVTVEGNACKVTESNLEKAKTMELNVGNEASFHGQERTKTGISEEAAIEENKRNDDSEADTAKLNAKEVATEEFNSDISLSDNTTPVKLNAQTEISEQTAAGELDGGNDVSDLHSSEETNTKMKNNEEMMIGEAMAETGHDGETENEGITTKTSKPDEAETNMLTAEMDNFVCDTVEMSTEEGIIDANKTETNTEYSKSEEKLDNNQMVMESDILQEDHHTSQKVEEPSQCLASGTAISELIIEDNNASPQKLRELDPSLVSANDSPSGMQTRCVWSPLASPSTSILKRGLKRSQEDEISSPVNKVRRVSFADPIYQAGLADDIDRRCSIVRSHSSNSSPIGKSVKTSPTTQSKHNTTSAKGFLSPGSRSPKFKSSKKCLISEMAKESIPCPTESVYPPLVNCVAPVDIILPQITSNMWARGLGQLIRAKNIKTIGDLSTLTASEIKTLPIRSPKVSNVKKALRIYHEQQVKTRGLEEIPVFDISEKTVNGIENKSLSPDEERLVSDIIDPVALEIPLSKNLLAQISALALQLDSEDLHNYSGSQLFEMHEKLSCMANSVIKNLQSRWRSPSHENSI

SEQ ID NO: 299 - protein, 2446 aa, Homo sapiens
MTARGQSPLAPLLETLEDPSASHGGQTDAYLTLTSRMTGEEGKEVITEIEKKLPRLYKVLKTHISSQNSELSSAALQALGFCLYNPKITSELSEANALELLSKLNDTIKNSDKNVRTRALWVISKQTFPSEVVGKMVSSIIDSLEILFNKGETHSAVVDFEALNVIVRLIEQAPIQMGEEAVRWAKLVIPLVVHSAQKVHLRGATALEMGMPLLLQKQQEIASITEQLMTTKLISELQKLFMSKNETYVLKLWPLFVKLLGRTLHRSGSFINSLLQLEELGFRSGAPMIKKIAFIAWKSLIDNFALNPDILCSAKRLKLLMQPLSSIHVRTETLALTKLEVWWYLLMRLGPHLPANFEQVCVPLIQSTISIDSNASPQGNSCHVATSPGLNPMTPVHKGASSPYGAPGTPRMNLSSNLGGMATIPSIQLLGLEMLLHFLLGPEALSFAKQNKLVLSLEPLEHPLISSPSFFSKHANTLITAVHDSFVAVGKDAPDVVVSAIWKELISLVKSVTESGNKKEKPGSEVLTLLLKSLESIVKSEVFPVSKTLVLMEITIKGLPQKVLGSPAYQVANMDILNGTPALFLIQLIFNNFLECGVSDERFFLSLESLVGCVLSGPTSPLAFSDSVLNVINQNAKQLENKEHLWKMWSVIVTPLTELINQTNEVNQGDALEHNFSAIYGALTLPVNHIFSEQRFPVATMKTLLRTWSELYRAFARCAALVATAEENLCCEELSSKIMSSLEDEGFSNLLFVDRIIYIITVMVDCIDFSPYNIKYQPKVKSPQRPSDWSKKKNEPLGKLTSLFKLIVKVIYSFHTLSFKEAHSDTLFTIGNSITGIISSVLGHISLPSMIRKIFATLTRPLALFYENSKLDEVPKVYSCLNNKLEKLLGEIIACLQFSYTGTYDSELLEQLSPLLCIIFLHKNKQIRKQSAQFWNATFAKVMMLVYPEELKPVLTQAKQKFLLLLPGLETVEMMEESSGPYSDGTENSQLNVKISGMERKSNGKRDSFLAQTKNKKENMKPAAKLKLESSSLKVKGEILLEEEKSTDFVFIPPEGKDAKERILTDHQKEVLKTKRCDIPAMYNNLDVSQDTLFTQYSQEEPMEIPTLTRKPKEDSKMMITEEQMDSDIVIPQDVTEDCGMAEHLEKSSLSNNECGSLDKTSPEMSNSNNDERKKALISSRKTSTECASSTENSFVVSSSSVSNTTVAGTPPYPTSRRQTFITLEKFDGSENRPFSPSPLNNISSTVTVKNNQETMIKTDFLPKAKQREGTFSKSDSEKIVNGTKRSSRRAGKAEQTGNKRSKPLMRSEPEKNTEESVEGIVVLENNPPGLLNQTECVSDNQVHLSESTMEHDNTKLKAATVENAVLLETNTVEEKNVEINLESKENTPPVVISADQMVNEDSQVQITPNQKTLRRSSRRRSEVVESTTESQDKENSHQKKERRKEEEKPLQKSPLHIKDDVLPKQKLIAEQTLQENLIEKGSNLHEKTLGETSANAETEQNKKKADPENIKSEGDGTQDIVDKSSEKLVRGRTRYQTRRASQGLLSSIENSESDSSEAKEEGSRKKRSGKWKNKSNESVDIQDQEEKVVKQECIKAENQSHDYKATSEEDVSIKSPICEKQDESNTVICQDSTVTSDLLQVPDDLPNVCEEKNETSKYAEYSFTSLPVPESNLRTRNAIKRLHKRDSFDNCSLGESSKIGISDISSLSEKTFQTLECQHKRSRRVRRSKGCDCCGEKSQPQEKSLIGLKNTENNDVEISETKKADVQAPVSPSETSQANPYSEGQFLDEHHSVNFHLGLKEDNDTINDSLIVSETKSKENTMQESLPSGIVNFREEICDMDSSEAMSLESQESPNENFKTVGPCLGDSKNVSQESLETKEEKPEETPKMELSLENVTVEGNACKVTESNLEKAKTMELNVGNEASFHGQERTKTGISEEAAIEENKRNDDSEADTAKLNAKEVATEEFNSDISLSDNTTPVKLNAQTEISEQTAAGELDGGNDVSDLHSSEETNTKMKNNEEMMIGEAMAETGHDGETENEGITTKTSKPDEAETNMLTAEMDNFVCDTVEMSTEEGIIDANKTETNTEYSKSEEKLDNNQMVMESDILQEDHHTSQKVEEPSQCLASGTAISELIIEDNNASPQKLRELDPSLVSANDSPSGMQTRCVWSPLASPSTSILKRGLKRSQEDEISSPVNKVRRVSFADPIYQAGLADDIDRRCSIVRSHSSNSSPIGKSVKTSPTTQSKISEMAKESIPCPTESVYPPLVNCVAPVDIILPQITSNMWARGLGQLIRAKNIKTIGDLSTLTASEIKTLPIRSPKVSNVKKALRIYHEQQVKTRGLEEIPVFDISEKTVNGIENKSLSPDEERLVSDIIDPVALEIPLSKNLLAQISALALQLDSEDLHNYSGSQLFEMHEKLSCMANSVIKNLQSRWRSPSHENSI

SEQ ID NO: 300 - protein, 1069 aa, Homo sapiens
MSDQAPKVPEEMFREVKYYAVGDIDPQVIQLLKAGKAKEVSYNALASHIISEDGDNPEVGEAREVFDLPVVKPSWVILSVQCGTLLPVNGFSPESCQIFFGITACLSQVSSEDRSALWALVTFYGGDCQLTLNKKCTHLIVPEPKGEKYECALKRASIKIVTPDWVLDCVSEKTKKDEAFYHPRLIIYEEEEEEEEEEEEVENEEQDSQNEGSTDEKSSPASSQEGSPSGDQQFSPKSNTEKSKGELMFDDSSDSSPEKQERNLNWTPAEVPQLAAAKRRLPQGKEPGLINLCANVPPVPGNILPPEVRGNLMAAGQNLQSSERSEMIATWSPAVRTLRNITNNADIQQMNRPSNVAHILQTLSAPTKNLEQQVNHSQQGHTNANAVLFSQVKVTPETHMLQQQQQAQQQQQQHPVLHLQPQQIMQLQQQQQQQISQQPYPQQPPHPFSQQQQQQQQAHPHQFSQQQLQFPQQQLHPPQQLHRPQQQLQPFQQQHALQQQFHQLQQHQLQQQQLAQLQQQHSLLQQQQQQQIQQQQLQRMHQQQQQQQMQSQTAPHLSQTSQALQHQVPPQQPPQQQQQQQPPPSPQQHQLFGHDPAVEIPEEGFLLGCVFAIADYPEQMSDKQLLATWKRIIQAHGGTVDPTFTSRCTHLLCESQVSSAYAQAIRERKRCVTAHWLNTVLKKKKMVPPHRALHFPVAFPPGGKPCSQHIISVTGFVDSDRDDLKLMAYLAGAKYTGYLCRSNTVLICKEPTGLKYEKAKEWRIPCVNAQWLGDILLGNFEALRQIQYSRYTAFSLQDPFAPTQHLVLNLLDAWRVPLKVSAELLMSIRLPPKLKQNEVANVQPSSKRARIEDVPPPTKKLTPELTPFVLFTGFEPVQVQQYIKKLYILGGEVAESAQKCTHLIASKVTRTVKFLTAISVVKHIVTPEWLEECFRCQKFIDEQNYILRDAEAEVLFSFSLEESLKRAHVSPLFKAKYFYITPGICPSLSTMKAIVECAGGKVLSKQPSFRKLMEHKQNSSLSEIILISCENDLHLCREYFARGIDVHNAEFVLTGVLTQTLDYESYKFN

SEQ ID NO: 301 - protein, 822 aa, Homo sapiens
MFDDSSDSSPEKQERNLNWTPAEVPQLAAAKRRLPQGKEPGLINLCANVPPVPGNILPPEVRGNLMAAGQNLQSSERSEMIATWSPAVRTLRNITNNADIQQMNRPSNVAHILQTLSAPTKNLEQQVNHSQQGHTNANAVLFSQVKVTPETHMLQQQQQAQQQQQQHPVLHLQPQQIMQLQQQQQQQISQQPYPQQPPHPFSQQQQQQQQAHPHQFSQQQLQFPQQQLHPPQQLHRPQQQLQPFQQQHALQQQFHQLQQHQLQQQQLAQLQQQHSLLQQQQQQQIQQQQLQRMHQQQQQQQMQSQTAPHLSQTSQALQHQVPPQQPPQQQQQQQPPPSPQQHQLFGHDPAVEIPEEGFLLGCVFAIADYPEQMSDKQLLATWKRIIQAHGGTVDPTFTSRCTHLLCESQVSSAYAQAIRERKRCVTAHWLNTVLKKKKMVPPHRALHFPVAFPPGGKPCSQHIISVTGFVDSDRDDLKLMAYLAGAKYTGYLCRSNTVLICKEPTGLKYEKAKEWRIPCVNAQWLGDILLGNFEALRQIQYSRYTAFSLQDPFAPTQHLVLNLLDAWRVPLKVSAELLMSIRLPPKLKQNEVANVQPSSKRARIEDVPPPTKKLTPELTPFVLFTGFEPVQVQQYIKKLYILGGEVAESAQKCTHLIASKVTRTVKFLTAISVVKHIVTPEWLEECFRCQKFIDEQNYILRDAEAEVLFSFSLEESLKRAHVSPLFKAKYFYITPGICPSLSTMKAIVECAGGKVLSKQPSFRKLMEHKQNSSLSEIILISCENDLHLCREYFARGIDVHNAEFVLTGVLTQTLDYESYKFN

SEQ ID NO: 302 - protein, 1069 aa, Homo sapiens; identical to SEQ ID NO: 300

SEQ ID NO: 303 - DNA, 19 bp, synthetic construct
  misc_feature 1..19: note = Synthetic
  source 1..19: mol_type = other DNA
cagatatcagcttagacaa

SEQ ID NO: 304 - protein, 949 aa, Homo sapiens
MSLAFKIFFPQTLRALSRKELCLFRKHHWRDVRQFSQWSETDLLHGHPLFLRRKPVLSFQGSHLRSRATYLVFLPGLHVGLCSGPCEMAEQRFCVDYAKRGTAGCKKCKEKIVKGVCRIGKVVPNPFSESGGDMKEWYHIKCMFEKLERARATTKKIEDLTELEGWEELEDNEKEQITQHIADLSSKAAGTPKKKAVVQAKLTTTGQVTSPVKGASFVTSTNPRKFSGFSAKPNNSGEAPSSPTPKRSLSSSKCDPRHKDCLLREFRKLCAMVADNPSYNTKTQIIQDFLRKGSAGDGFHGDVYLTVKLLLPGVIKTVYNLNDKQIVKLFSRIFNCNPDDMARDLEQGDVSETIRVFFEQSKSFPPAAKSLLTIQEVDEFLLRLSKLTKEDEQQQALQDIASRCTANDLKCIIRLIKHDLKMNSGAKHVLDALDPNAYEAFKASRNLQDVVERVLHNAQEVEKEPGQRRALSVQASLMTPVQPMLAEACKSVEYAMKKCPNGMFSEIKYDGERVQVHKNGDHFSYFSRSLKPVLPHKVAHFKDYIPQAFPGGHSMILDSEVLLIDNKTGKPLPFGTLGVHKKAAFQDANVCLFVFDCIYFNDVSLMDRPLCERRKFLHDNMVEIPNRIMFSEMKRVTKALDLADMITRVIQEGLEGLVLKDVKGTYEPGKRHWLKVKKDYLNEGAMADTADLVVLGAFYGQGSKGGMMSIFLMGCYDPGSQKWCTVTKCAGGHDDATLARLQNELDMVKISKDPSKIPSWLKVNKIYYPDFIVPDPKKAAVWEITGAEFSKSEAHTADGISIRFPRCTRIRDDKDWKSATNLPQLKELYQLSKEKADFTVVAGDEGSSTTGGSSEENKGPSGSAVSRKAPSKPSASTKKAEGKLSNSNSKDGNMQTAKPSAMKVGEKLATKSSPVKVGEKRKAADETLCQTKRRPASEQRGRTVPAGRR

SEQ ID NO: 305 - protein, 1009 aa, Homo sapiens
MSLAFKIFFPQTLRALSRKELCLFRKHHWRDVRQFSQWSETDLLHGHPLFLRRKPVLSFQGSHLRSRATYLVFLPGLHVGLCSGPCEMAEQRFCVDYAKRGTAGCKKCKEKIVKGVCRIGKVVPNPFSESGGDMKEWYHIKCMFEKLERARATTKKIEDLTELEGWEELEDNEKEQITQHIADLSSKAAGTPKKKAVVQAKLTTTGQVTSPVKGASFVTSTNPRKFSGFSAKPNNSGEAPSSPTPKRSLSSSKCDPRHKDCLLREFRKLCAMVADNPSYNTKTQIIQDFLRKGSAGDGFHGDVYLTVKLLLPGVIKTVYNLNDKQIVKLFSRIFNCNPDDMARDLEQGDVSETIRVFFEQSKSFPPAAKSLLTIQEVDEFLLRLSKLTKEDEQQQALQDIASRCTANDLKCIIRLIKHDLKMNSGAKHVLDALDPNAYEAFKASRNLQDVVERVLHNAQEVEKEPGQRRALSVQASLMTPVQPMLAEACKSVEYAMKKCPNGMFSEIKYDGERVQVHKNGDHFSYFSRSLKPVLPHKVAHFKDYIPQAFPGGHSMILDSEVLLIDNKTGKPLPFGTLGVHKKAAFQDANVCLFVFDCIYFNDVSLMDRPLCERRKFLHDNMVEIPNRIMFSEMKRVTKALDLADMITRVIQEGLEGLVLKDVKGTYEPGKRHWLKVKKDYLNEGAMADTADLVVLGAFYGQGSKGGMMSIFLMGCYDPGSQKWCTVTKCAGGHDDATLARLQNELDMVKISKDPSKIPSWLKVNKIYYPDFIVPDPKKAAVWEITGAEFSKSEAHTADGISIRFPRCTRIRDDKDWKSATNLPQLKELYQLSKEKADFTVVAGDEGSSTTGGSSEENKGPSGSAVSRKAPSKPSASTKKAEGKLSNSNSKDGNMQTAKPSAMKVGEKLATKSSPVKVGEKRKAADETLCQTKVLLDIFTGVRLYLPPSTPDFSRLRRYFVAFDGDLVQEFDMTSATHVLGSRDKNPAAQQVSPEWIWACIRKRRLVAPC

SEQ ID NO: 306 - protein, 1059 aa, Homo sapiens
MVDVLLLFSLCLLFHISRPDLSHNRLSFIKASSMSHLQSLREVKLNNNELETIPNLGPVSANITLLSLAGNRIVEILPEHLKEFQSLETLDLSSNNISELQTAFPALQLKYLYLNSNRVTSMEPGYFDNLANTLLVLKLNRNRISAIPPKMFKLPQLQHLELNRNKIKNVDGLTFQGLGALKSLKMQRNGVTKLMDGAFWGLSNMEILQLDHNNLTEITKGWLYGLLMLQELHLSQNAINRISPDAWEFCQKLSELDLTFNHLSRLDDSSFLGLSLLNTLHIGNNRVSYIADCAFRGLSSLKTLDLKNNEISWTIEDMNGAFSGLDKLRRLILQGNRIRSITKKAFTGLDALEHLDLSDNAIMSLQGNAFSQMKKLQQLHLNTSSLLCDCQLKWLPQWVAENNFQSFVNASCAHPQLLKGRSIFAVSPDGFVCDDFPKPQITVQPETQSAIKGSNLSFICSAASSSDSPMTFAWKKDNELLHDAEMENYAHLRAQGGEVMEYTTILRLREVEFASEGKYQCVISNHFGSSYSVKAKLTVNMLPSFTKTPMDLTIRAGAMARLECAAVGHPAPQIAWQKDGGTDFPAARERRMHVMPEDDVFFIVDVKIEDIGVYSCTAQNSAGSISANATLTVLETPSFLRPLLDRTVTKGETAVLQCIAGGSPPPKLNWTKDDSPLVVTERHFFAAGNQLLIIVDSDVSDAGKYTCEMSNTLGTERGNVRLSVIPTPTCDSPQMTAPSLDDDGWATVGVVIIAVVCCVVGTSLVWVVIIYHTRRRNEDCSITNTDETNLPADIPSYLSSQGTLADRQDGYVSSESGSHHQFVTSSGAGFFLPQHDSSGTCHIDNSSEADVEAATDLFLCPFLGSTGPMYLKGNVYGSDPFETYHTGCSPDPRTVLMDHYEPSYIKKKECYPCSHPSEESCERSFSNISWPSHVRKLLNTSYSHNEGPGMKNLCLNKSSLDFSANPEPASVASSNSFMGTFGKALRRPHLDAYSSFGQPSDCQPRAFYLKAHSSPDLDSGSEEDGKERTDFQEENHICTFKQTLENYRTPNFQSYDLDT

SEQ ID NO: 307 - protein, 916 aa, Homo sapiens
MESGQPARRIAMAPLLEYERQLVLELLDTDGLVVCARGLGADRLLYHFLQLHCHPACLVLVLNTQPAEEEYFINQLKIEGVEHLPRRVTNEITSNSRYEVYTQGGVIFATSRILVVDFLTDRIPSDLITGILVYRAHRIIESCQEAFILRLFRQKNKRGFIKAFTDNAVAFDTGFCHVERVMRNLFVRKLYLWPRFHVAVNSFLEQHKPEVVEIHVSMTPTMLAIQTAILDILNACLKELKCHNPSLEVEDLSLENAIGKPFDKTIRHYLDPLWHQLGAKTKSLVQDLKILRTLLQYLSQYDCVTFLNLLESLRATEKAFGQNSGWLFLDSSTSMFINARARVYHLPDAKMSKKEKISEKMEIKEGEETKKELVLESNPKWEALTEVLKEIEAENKESEALGGPGQVLICASDDRTCSQLRDYITLGAEAFLLRLYRKTFEKDSKAEEVWMKFRKEDSSKRIRKSHKRPKDPQNKERASTKERTLKKKKRKLTLTQMVGKPEELEEEGDVEEGYRREISSSPESCPEEIKHEEFDVNLSSDAAFGILKEPLTIIHPLLGCSDPYALTRVLHEVEPRYVVLYDAELTFVRQLEIYRASRPGKPLRVYFLIYGGSTEEQRYLTALRKEKEAFEKLIREKASMVVPEEREGRDETNLDLVRGTASADVSTDTRKAGGQEQNGTQQSIVVDMREFRSELPSLIHRRGIDIEPVTLEVGDYILTPEMCVERKSISDLIGSLNNGRLYSQCISMSRYYKRPVLLIEFDPSKPFSLTSRGALFQEISSNDISSKLTLLTLHFPRLRILWCPSPHATAELFEELKQSKPQPDAATALAITADSETLPESEKYNPGPQDFLLKMPGVNAKNCRSLMHHVKNIAELAALSQDELTSILGNAANAKQLYDFIHTSFAEVVSKGKGKK

SEQ ID NO: 308 - protein, 297 aa, Homo sapiens
MDPGKDKEGVPQPSGPPARKKFVIPLDEDEVPPGVAKPLFRSTQSLPTVDTSAQAAPQTYAEYAISQPLEGAGATCPTGSEPLAGETPNQALKPGAKSNSIIVSPRQRGNPVLKFVRNVPWEFGDVIPDYVLGQSTCALFLSLRYHNLHPDYIHGRLQSLGKNFALRVLLVQVDVKDPQQALKELAKMCILADCTLILAWSPEEAGRYLETYKAYEQKPADLLMEKLEQDFVSRVTECLTTVKSVNKTDSQTLLTTFGSLEQLIAASREDLALCPGLGPQKARRLFDVLHEPFLKVP

SEQ ID NO: 309 - protein, 273 aa, Homo sapiens
MDPGKDKEGVPQPSGPPARKKFVIPLDEDEVPPGVAKPLFRSTQSLPTVDTSAQAAPQTYAEYAISQPLEGAGATCPTGSEPLAGETPNQALKPGAKSNSIIVSPRQRGNPVLKFVRNVPWEFGDVIPDYVLGQSTCALFLSLRYHNLHPDYIHGRLQSLGKNFALRVLLVQVDVKDPQQALKELAKMCILADCTLILAWSPEEAGRYLETYKAYEQKPADLLMEKLEQDFVSRSLEQLIAASREDLALCPGLGPQKARRLFDVLHEPFLKVP

SEQ ID NO: 310 - protein, 323 aa, Homo sapiens
MDPGKDKEGVPQPSGPPARKKFVIPLDEDEVPPGVAKPLFRSTQSLPTVDTSAQAAPQTYAEYAISQPLEGAGATCPTGSEPLAGETPNQALKPGAKSNSIIVSPRQRGNPVLKFVRNVPWEFGDVIPDYVLGQSTCALFLSLRYHNLHPDYIHGRLQSLGKNFALRVLLVQVDVKDPQQALKELAKMCILADCTLILAWSPEEAGRYLETYKAYEQKPADLLMEKLEQDFVSRVTECLTTVKSVNKTDSQTLLTTFGSLEQLIAASREDLALCPGLGPQKVRALGKNPRSWGKERAPNKHNLRPQSFKVKKEPKTRHSGFRL

SEQ ID NO: 311 - protein, 225 aa, Homo sapiens
MDPGKDKEGVPQPSGPPARKKFVIPLDEDEVPPGVRGNPVLKFVRNVPWEFGDVIPDYVLGQSTCALFLSLRYHNLHPDYIHGRLQSLGKNFALRVLLVQVDVKDPQQALKELAKMCILADCTLILAWSPEEAGRYLETYKAYEQKPADLLMEKLEQDFVSRVTECLTTVKSVNKTDSQTLLTTFGSLEQLIAASREDLALCPGLGPQKARRLFDVLHEPFLKVP

SEQ ID NO: 312 - protein, 919 aa, Homo sapiens
MQRSIMSFFHPKKEGKAKKPEKEASNSSRETEPPPKAALKEWNGVVSESDSPVKRPGRKAARVLGSEGEEEDEALSPAKGQKPALDCSQVSPPRPATSPENNASLSDTSPMDSSPSGIPKRRTARKQLPKRTIQEVLEEQSEDEDREAKRKKEEEEEETPKESLTEAEVATEKEGEDGDQPTTPPKPLKTSKAETPTESVSEPEVATKQELQEEEEQTKPPRRAPKTLSSFFTPRKPAVKKEVKEEEPGAPGKEGAAEGPLDPSGYNPAKNNYHPVEDACWKPGQKVPYLAVARTFEKIEEVSARLRMVETLSNLLRSVVALSPPDLLPVLYLSLNHLGPPQQGLELGVGDGVLLKAVAQATGRQLESVRAEAAEKGDVGLVAENSRSTQRLMLPPPPLTASGVFSKFRDIARLTGSASTAKKIDIIKGLFVACRHSEARFIARSLSGRLRLGLAEQSVLAALSQAVSLTPPGQEFPPAMVDAGKGKTAEARKTWLEEQGMILKQTFCEVPDLDRIIPVLLEHGLERLPEHCKLSPGIPLKPMLAHPTRGISEVLKRFEEAAFTCEYKYDGQRAQIHALEGGEVKIFSRNQEDNTGKYPDIISRIPKIKLPSVTSFILDTEAVAWDREKKQIQPFQVLTTRKRKEVDASEIQVQVCLYAFDLIYLNGESLVREPLSRRRQLLRENFVETEGEFVFATSLDTKDIEQIAEFLEQSVKDSCEGLMVKTLDVDATYEIAKRSHNWLKLKKDYLDGVGDTLDLVVIGAYLGRGKRAGRYGGFLLASYDEDSEELQAICKLGTGFSDEELEEHHQSLKALVLPSPRPYVRIDGAVIPDHWLDPSAVWEVKCADLSLSPIYPAARGLVDSDKGISLRFPRFIRVREDKQPEQATTSAQVACLYRKQSQIQNQQGEDSGSDPEDTY

SEQ ID NO: 313 - protein, 888 aa, Homo sapiens
MQRSIMAALKEWNGVVSESDSPVKRPGRKAARVLGSEGEEEDEALSPAKGQKPALDCSQVSPPRPATSPENNASLSDTSPMDSSPSGIPKRRTARKQLPKRTIQEVLEEQSEDEDREAKRKKEEEEETPKESLTEAEVATEKEGEDGDQPTTPPKPLKTSKAETPTESVSEPEVATKQELQEEEEQTKPPRRAPKTLSSFFTPRKPAVKKEVKEEEPGAPGKEGAAEGPLDPSGYNPAKNNYHPVEDACWKPGQKVPYLAVARTFEKIEEVSARLRMVETLSNLLRSVVALSPPDLLPVLYLSLNHLGPPQQGLELGVGDGVLLKAVAQATGRQLESVRAEAAEKGDVGLVAENSRSTQRLMLPPPPLTASGVFSKFRDIARLTGSASTAKKIDIIKGLFVACRHSEARFIARSLSGRLRLGLAEQSVLAALSQAVSLTPPGQEFPPAMVDAGKGKTAEARKTWLEEQGMILKQTFCEVPDLDRIIPVLLEHGLERLPEHCKLSPGIPLKPMLAHPTRGISEVLKRFEEAAFTCEYKYDGQRAQIHALEGGEVKIFSRNQEDNTGKYPDIISRIPKIKLPSVTSFILDTEAVAWDREKKQIQPFQVLTTRKRKEVDASEIQVQVCLYAFDLIYLNGESLVREPLSRRRQLLRENFVETEGEFVFATSLDTKDIEQIAEFLEQSVKDSCEGLMVKTLDVDATYEIAKRSHNWLKLKKDYLDGVGDTLDLVVIGAYLGRGKRAGRYGGFLLASYDEDSEELQAICKLGTGFSDEELEEHHQSLKALVLPSPRPYVRIDGAVIPDHWLDPSAVWEVKCADLSLSPIYPAARGLVDSDKGISLRFPRFIRVREDKQPEQATTSAQVACLYRKQSQIQNQQGEDSGSDPEDTY

SEQ ID NO: 314 - protein, 851 aa, Homo sapiens
MQRSIMSFFHPKKEGKAKKPEKEASNSSRETEPPPKAALKEWNGVVSESDSPVKRPGRKAARVLGSEGEEEDEALSPAKGQKPALDCSQVSPPRPATSPENNASLSDTSPMDSSPSGIPKRRTEAETPTESVSEPEVATKQELQEEEEQTKPPRRAPKTLSSFFTPRKPAVKKEVKEEEPGAPGKEGAAEGPLDPSGYNPAKNNYHPVEDACWKPGQKVPYLAVARTFEKIEEVSARLRMVETLSNLLRSVVALSPPDLLPVLYLSLNHLGPPQQGLELGVGDGVLLKAVAQATGRQLESVRAEAAEKGDVGLVAENSRSTQRLMLPPPPLTASGVFSKFRDIARLTGSASTAKKIDIIKGLFVACRHSEARFIARSLSGRLRLGLAEQSVLAALSQAVSLTPPGQEFPPAMVDAGKGKTAEARKTWLEEQGMILKQTFCEVPDLDRIIPVLLEHGLERLPEHCKLSPGIPLKPMLAHPTRGISEVLKRFEEAAFTCEYKYDGQRAQIHALEGGEVKIFSRNQEDNTGKYPDIISRIPKIKLPSVTSFILDTEAVAWDREKKQIQPFQVLTTRKRKEVDASEIQVQVCLYAFDLIYLNGESLVREPLSRRRQLLRENFVETEGEFVFATSLDTKDIEQIAEFLEQSVKDSCEGLMVKTLDVDATYEIAKRSHNWLKLKKDYLDGVGDTLDLVVIGAYLGRGKRAGRYGGFLLASYDEDSEELQAICKLGTGFSDEELEEHHQSLKALVLPSPRPYVRIDGAVIPDHWLDPSAVWEVKCADLSLSPIYPAARGLVDSDKGISLRFPRFIRVREDKQPEQATTSAQVACLYRKQSQIQNQQGEDSGSDPEDTY

SEQ ID NO: 315 - protein, 2590 aa, Homo sapiens
MNLLRRSGKRRRSESGSDSFSGSGGDSSASPQFLSGSVLSPPPGLGRCLKAAAAGECKPTVPDYERDKLLLANWGLPKAVLEKYHSFGVKKMFEWQAECLLLGQVLEGKNLVYSAPTSAGKTLVAELLILKRVLEMRKKALFILPFVSVAKEKKYYLQSLFQEVGIKVDGYMGSTSPSRHFSSLDIAVCTIERANGLINRLIEENKMDLLGMVVVDELHMLGDSHRGYLLELLLTKICYITRKSASCQADLASSLSNAVQIVGMSATLPNLELVASWLNAELYHTDFRPVPLLESVKVGNSIYDSSMKLVREFEPMLQVKGDEDHVVSLCYETICDNHSVLLFCPSKKWCEKLADIIAREFYNLHHQAEGLVKPSECPPVILEQKELLEVMDQLRRLPSGLDSVLQKTVPWGVAFHHAGLTFEERDIIEGAFRQGLIRVLAATSTLSSGVNLPARRVIIRTPIFGGRPLDILTYKQMVGRAGRKGVDTVGESILICKNSEKSKGIALLQGSLKPVRSCLQRREGEEVTGSMIRAILEIIVGGVASTSQDMHTYAACTFLAASMKEGKQGIQRNQESVQLGAIEACVMWLLENEFIQSTEASDGTEGKVYHPTHLGSATLSSSLSPADTLDIFADLQRAMKGFVLENDLHILYLVTPMFEDWTTIDWYRFFCLWEKLPTSMKRVAELVGVEEGFLARCVKGKVVARTERQHRQMAIHKRFFTSLVLLDLISEVPLREINQKYGCNRGQIQSLQQSAAVYAGMITVFSNRLGWHNMELLLSQFQKRLTFGIQRELCDLVRVSLLNAQRARVLYASGFHTVADLARANIVEVEVILKNAVPFKSARKAVDEEEEAVEERRNMRTIWVTGRKGLTEREAAALIVEEARMILQQDLVEMGVQWNPCALLHSSTCSLTHSESEVKEHTFISQTKSSYKKLTSKNKSNTIFSDSYIKHSPNIVQDLNKSREHTSSFNCNFQNGNQEHQTCSIFRARKRASLDINKEKPGASQNEGKTSDKKVVQTFSQKTKKAPLNFNSEKMSRSFRSWKRRKHLKRSRDSSPLKDSGACRIHLQGQTLSNPSLCEDPFTLDEKKTEFRNSGPFAKNVSLSGKEKDNKTSFPLQIKQNCSWNITLTNDNFVEHIVTGSQSKNVTCQATSVVSEKGRGVAVEAEKINEVLIQNGSKNQNVYMKHHDIHPINQYLRKQSHEQTSTITKQKNIIERQMPCEAVSSYINRDSNVTINCERIKLNTEENKPSHFQALGDDISRTVIPSEVLPSAGAFSKSEGQHENFLNISRLQEKTGTYTTNKTKNNHVSDLGLVLCDFEDSFYLDTQSEKIIQQMATENAKLGAKDTNLAAGIMQKSLVQQNSMNSFQKECHIPFPAEQHPLGATKIDHLDLKTVGTMKQSSDSHGVDILTPESPIFHSPILLEENGLFLKKNEVSVTDSQLNSFLQGYQTQETVKPVILLIPQKRTPTGVEGECLPVPETSLNMSDSLLFDSFSDDYLVKEQLPDMQMKEPLPSEVTSNHFSDSLCLQEDLIKKSNVNENQDTHQQLTCSNDESIIFSEMDSVQMVEALDNVDIFPVQEKNHTVVSPRALELSDPVLDEHHQGDQDGGDQDERAEKSKLTGTRQNHSFIWSGASFDLSPGLQRILDKVSSPLENEKLKSMTINFSSLNRKNTELNEEQEVISNLETKQVQGISFSSNNEVKSKIEMLENNANHDETSSLLPRKESNIVDDNGLIPPTPIPTSASKLTFPGILETPVNPWKTNNVLQPGESYLFGSPSDIKNHDLSPGSRNGFKDNSPISDTSFSLQLSQDGLQLTPASSSSESLSIIDVASDQNLFQTFIKEWRCKKRFSISLACEKIRSLTSSKTATIGSRFKQASSPQEIPIRDDGFPIKGCDDTLVVGLAVCWGGRDAYYFSLQKEQKHSEISASLVPPSLDPSLTLKDRMWYLQSCLRKESDKECSVVIYDFIQSYKILLLSCGISLEQSYEDPKVACWLLDPDSQEPTLHSIVTSFLPHELPLLEGMETSQGIQSLGLNAGSEHSGRYRASVESILIFNSMNQLNSLLQKENLQDVFRKVEMPSQYCLALLELNGIGFSTAECESQKHIMQAKLDAIETQAYQLAGHSFSFTSSDDIAEVLFLELKLPPNREMKNQGSKKTLGSTRRGIDNGRKLRLGRQFSTSKDVLNKLKALHPLPGLILEWRRITNAITKVVFPLQREKCLNPFLGMERIYPVSQSHTATGRITFTEPNIQNVPRDFEIKMPTLVGESPPSQAVGKGLLPMGRGKYKKGFSVNPRCQAQMEERAADRGMPFSISMRHAFVPFPGGSILAADYSQLELRILAHLSHDRRLIQVLNTGADVFRSIAAEWKMIEPESVGDDLRQQAKQICYGIIYGMGAKSLGEQMGIKENDAACYIDSFKSRYTGINQFMTETVKNCKRDGFVQTILGRRRYLPGIKDNNPYRKAHAERQAINTIVQGSAADIVKIATVNIQKQLETFHSTFKSHGHREGMLQSDQTGLSRKRKLQGMFCPIRGGFFILQLHDELLYEVAEEDVVQVAQIVKNEMESAVKLSVKLKVKVKIGASWGELKDFDV

SEQ ID NO: 316 - protein, 1762 aa, Homo sapiens
MNSFLSFPISLCSARKAVDEEEEAVEERRNMRTIWVTGRKGLTEREAAALIVEEARMILQQDLVEMGVQWNPCALLHSSTCSLTHSESEVKEHTFISQTKSSYKKLTSKNKSNTIFSDSYIKHSPNIVQDLNKSREHTSSFNCNFQNGNQEHQTCSIFRARKRASLDINKEKPGASQNEGKTSDKKVVQTFSQKTKKAPLNFNSEKMSRSFRSWKRRKHLKRSRDSSPLKDSGACRIHLQGQTLSNPSLCEDPFTLDEKKTEFRNSGPFAKNVSLSGKEKDNKTSFPLQIKQNCSWNITLTNDNFVEHIVTGSQSKNVTCQATSVVSEKGRGVAVEAEKINEVLIQNGSKNQNVYMKHHDIHPINQYLRKQSHEQTSTITKQKNIIERQMPCEAVSSYINRDSNVTINCERIKLNTEENKPSHFQALGDDISRTVIPSEVLPSAGAFSKSEGQHENFLNISRLQEKTGTYTTNKTKNNHVSDLGLVLCDFEDSFYLDTQSEKIIQQMATENAKLGAKDTNLAAGIMQKSLVQQNSMNSFQKECHIPFPAEQHPLGATKIDHLDLKTVGTMKQSSDSHGVDILTPESPIFHSPILLEENGLFLKKNEVSVTDSQLNSFLQGYQTQETVKPVILLIPQKRTPTGVEGECLPVPETSLNMSDSLLFDSFSDDYLVKEQLPDMQMKEPLPSEVTSNHFSDSLCLQEDLIKKSNVNENQDTHQQLTCSNDESIIFSEMDSVQMVEALDNVDIFPVQEKNHTVVSPRALELSDPVLDEHHQGDQDGGDQDERAEKSKLTGTRQNHSFIWSGASFDLSPGLQRILDKVSSPLENEKLKSMTINFSSLNRKNTELNEEQEVISNLETKQVQGISFSSNNEVKSKIEMLENNANHDETSSLLPRKESNIVDDNGLIPPTPIPTSASKLTFPGILETPVNPWKTNNVLQPGESYLFGSPSDIKNHDLSPGSRNGFKDNSPISDTSFSLQLSQDGLQLTPASSSSESLSIIDVASDQNLFQTFIKEWRCKKRFSISLACEKIRSLTSSKTATIGSRFKQASSPQEIPIRDDGFPIKGCDDTLVVGLAVCWGGRDAYYFSLQKEQKHSEISASLVPPSLDPSLTLKDRMWYLQSCLRKESDKECSVVIYDFIQSYKILLLSCGISLEQSYEDPKVACWLLDPDSQEPTLHSIVTSFLPHELPLLEGMETSQGIQSLGLNAGSEHSGRYRASVESILIFNSMNQLNSLLQKENLQDVFRKVEMPSQYCLALLELNGIGFSTAECESQKHIMQAKLDAIETQAYQLAGHSFSFTSSDDIAEVLFLELKLPPNREMKNQGSKKTLGSTRRGIDNGRKLRLGRQFSTSKDVLNKLKALHPLPGLILEWRRITNAITKVVFPLQREKCLNPFLGMERIYPVSQSHTATGRITFTEPNIQNVPRDFEIKMPTLVGESPPSQAVGKGLLPMGRGKYKKGFSVNPRCQAQMEERAADRGMPFSISMRHAFVPFPGGSILAADYSQLELRILAHLSHDRRLIQVLNTGADVFRSIAAEWKMIEPESVGDDLRQQAKQICYGIIYGMGAKSLGEQMGIKENDAACYIDSFKSRYTGINQFMTETVKNCKRDGFVQTILGRRRYLPGIKDNNPYRKAHAERQAINTIVQGSAADIVKIATVNIQKQLETFHSTFKSHGHREGMLQSDQTGLSRKRKLQGMFCPIRGGFFILQLHDELLYEVAEEDVVQVAQIVKNEMESAVKLSVKLKVKVKIGASWGELKDFDV

SEQ ID NO: 317 - protein, 633 aa, Homo sapiens
MPEIRLRHVVSCSSQDSTHCAENLLKADTYRKWRAAKAGEKTISVVLQLEKEEQIHSVDIGNDGSAFVEVLVGSSAGGAGEQDYEVLLVTSSFMSPSESRSGSNPNRVRMFGPDKLVRAAAEKRWDRVKIVCSQPYSKDSPFGLSFVRFHSPPDKDEAEAPSQKVTVTKLGQFRVKEEDESANSLRPGALFFSRINKTSPVTASDPAGPSYAAATLQASSAASSASPVSRAIGSTSKPQESPKGKRKLDLNQEEKKTPSKPPAQLSPSVPKRPKLPAPTRTPATAPVPARAQGAVTGKPRGEGTEPRRPRAGPEELGKILQGVVVVLSGFQNPFRSELRDKALELGAKYRPDWTRDSTHLICAFANTPKYSQVLGLGGRIVRKEWVLDCHRMRRRLPSRRYLMAGPGSSSEEDEASHSGGSGDEAPKLPQKQPQTKTKPTQAAGPSSPQKPPTPEETKAASPVLQEDIDIEGVQSEGQDNGAEDSGDTEDELRRVAEQKEHRLPPGQEENGEDPYAGSTDENTDSEEHQEPPDLPVPELPDFFQGKHFFLYGEFPGDERRKLIRYVTAFNGELEDNMSDRVQFVITAQEWDPSFEEALMDNPSLAFVRPRWIYSCNEKQKLLPHQLYGVVPQA

SEQ ID NO: 318 - protein, 1720 aa, Homo sapiens
MLISKNMPWRRLQGISFGMYSAEELKKLSVKSITNPRYLDSLGNPSANGLYDLALGPADSKEVCSTCVQDFSNCSGHLGHIELPLTVYNPLLFDKLYLLLRGSCLNCHMLTCPRAVIHLLLCQLRVLEVGALQAVYELERILNRFLEENPDPSASEIREELEQYTTEIVQNNLLGSQGAHVKNVCESKSKLIALFWKAHMNAKRCPHCKTGRSVVRKEHNSKLTITFPAMVHRTAGQKDSEPLGIEEAQIGKRGYLTPTSAREHLSALWKNEGFFLNYLFSGMDDDGMESRFNPSVFFLDFLVVPPSRYRPVSRLGDQMFTNGQTVNLQAVMKDVVLIRKLLALMAQEQKLPEEVATPTTDEEKDSLIAIDRSFLSTLPGQSLIDKLYNIWIRLQSHVNIVFDSEMDKLMMDKYPGIRQILEKKEGLFRKHMMGKRVDYAARSVICPDMYINTNEIGIPMVFATKLTYPQPVTPWNVQELRQAVINGPNVHPGASMVINEDGSRTALSAVDMTQREAVAKQLLTPATGAPKPQGTKIVCRHVKNGDILLLNRQPTLHRPSIQAHRARILPEEKVLRLHYANCKAYNADFDGDEMNAHFPQSELGRAEAYVLACTDQQYLVPKDGQPLAGLIQDHMVSGASMTTRGCFFTREHYMELVYRGLTDKVGRVKLLSPSILKPFPLWTGKQVVSTLLINIIPEDHIPLNLSGKAKITGKAWVKETPRSVPGFNPDSMCESQVIIREGELLCGVLDKAHYGSSAYGLVHCCYEIYGGETSGKVLTCLARLFTAYLQLYRGFTLGVEDILVKPKADVKRQRIIEESTHCGPQAVRAALNLPEAASYDEVRGKWQDAHLGKDQRDFNMIDLKFKEEVNHYSNEINKACMPFGLHRQFPENSLQMMVQSGAKGSTVNTMQISCLLGQIELEGRRPPLMASGKSLPCFEPYEFTPRAGGFVTGRFLTGIKPPEFFFHCMAGREGLVDTAVKTSRSGYLQRCIIKHLEGLVVQYDLTVRDSDGSVVQFLYGEDGLDIPKTQFLQPKQFPFLASNYEVIMKSQHLHEVLSRADPKKALHHFRAIKKWQSKHPNTLLRRGAFLSYSQKIQEAVKALKLESENRNGRSPGTQEMLRMWYELDEESRRKYQKKAAACPDPSLSVWRPDIYFASVSETFETKVDDYSQEWAAQTEKSYEKSELSLDRLRTLLQLKWQRSLCEPGEAVGLLAAQSIGEPSTQMTLNTFHFAGRGEMNVTLGIPRLREILMVASANIKTPMMSVPVLNTKKALKRVKSLKKQLTRVCLGEVLQKIDVQESFCMEEKQNKFQVYQLRFQFLPHAYYQQEKCLRPEDILRFMETRFFKLLMESIKKKNNKASAFRNVNTRRATQRDLDNAGELGRSRGEQEGDEEEEGHIVDAEAEEGDADASDAKRKEKQEEEVDYESEEEEEREGEENDDEDMQEERNPHREGARKTQEQDEEVGLGTEEDPSLPALLTQPRKPTHSQEPQGPEAMERRVQAVREIHPFIDDYQYDTEESLWCQVTVKLPLMKINFDMSSLVVSLAHGAVIYATKGITRCLLNETTNNKNEKELVLNTEGINLPELFKYAEVLDLRRLYSNDIHAIANTYGIEAALRVIEKEIKDVFAVYGIAVDPRHLSLVADYMCFEGVYKPLNRFGIRSNSSPLQQMTFETSFQFLKQATMLGSHDELRSPSACLVVGKVVRGGTGLFELKQPLR

SEQ ID NO: 319 - protein, 270 aa, Homo sapiens
MWNSGFESYGSSSYGGAGGYTQSPGGFGSPAPSQAEKKSRARAQHIVPCTISQLLSATLVDEVFRIGNVEISQVTIVGIIRHAEKAPTNIVYKIDDMTAAPMDVRQWVDTDDTSSENTVVPPETYVKVAGHLRSFQNKKSLVAFKIMPLEDMNEFTTHILEVINAHMVLSKANSQPSAGRAPISNPGMSEAGNFGGNSFMPANGLTVAQNQVLNLIKACPRPEGLNFQDLKNQLKHMSVSSIKQAVDFLSNEGHIYSTVDDDHFKSTDAE

SEQ ID NO: 320 - protein, 278 aa, Homo sapiens
MGRGDRNKRSIRGFESYGSSSYGGAGGYTQSPGGFGSPAPSQAEKKSRARAQHIVPCTISQLLSATLVDEVFRIGNVEISQVTIVGIIRHAEKAPTNIVYKIDDMTAAPMDVRQWVDTDDTSSENTVVPPETYVKVAGHLRSFQNKKSLVAFKIMPLEDMNEFTTHILEVINAHMVLSKANSQPSAGRAPISNPGMSEAGNFGGNSFMPANGLTVAQNQVLNLIKACPRPEGLNFQDLKNQLKHMSVSSIKQAVDFLSNEGHIYSTVDDDHFKSTDAE

SEQ ID NO: 321 - protein, 358 aa, Homo sapiens
MWNSNDGGAGWRRKRIAGGFSKRASLGSERRVVAGEEGRERSWGVWGSPAGRRRGRLGRLGQCLKGRSLREPAGFSEAWDVAQALILLFKTGGFESYGSSSYGGAGGYTQSPGGFGSPAPSQAEKKSRARAQHIVPCTISQLLSATLVDEVFRIGNVEISQVTIVGIIRHAEKAPTNIVYKIDDMTAAPMDVRQWVDTDDTSSENTVVPPETYVKVAGHLRSFQNKKSLVAFKIMPLEDMNEFTTHILEVINAHMVLSKANSQPSAGRAPISNPGMSEAGNFGGNSFMPANGLTVAQNQVLNLIKACPRPEGLNFQDLKNQLKHMSVSSIKQAVDFLSNEGHIYSTVDDDHFKSTDAE

SEQ ID NO: 322 - protein, 418 aa, Homo sapiens
MSGTEEAILGGRDSHPAAGGGSVLCFGQCQYTAEEYQAIQKALRQRLGPEYISSRMAGGGQKVCYIEGHRVINLANEMFGYNGWAHSITQQNVDFVDLNNGKFYVGVCAFVRVQLKDGSYHEDVGYGVSEGLKSKALSLEKARKEAVTDGLKRALRSFGNALGNCILDKDYLRSLNKLPRQLPLEVDLTKAKRQDLEPSVEEARYNSCRPNMALGHPQLQQVTSPSRPSHAVIPADQDCSSRSLSSSAVESEATHQRKLRQKQLQQQFRERMEKQQVRVSTPSAEKSEAAPPAPPVTHSTPVTVSEPLLEKDFLAGVTQELIKTLEDNSEKWAVTPDAGDGVVKPSSRADPAQTSDTLALNNQMVTQNRTPHSVCHQKPQAKSGSWDLQTYSADQRTTGNWESHRKSQDMKKRKYDPS

SEQ ID NO: 323 - protein, 226 aa, Homo sapiens
MSGTEEAILGGRDSHPAAGGGSVLCFGQCQYTAEEYQAIQKALRQRLGPEYISSRMAGGGQKVCYIEGHRVINLANEMFGYNGWAHSITQQNVDFVDLNNGKFYVGVCAFVRVQLKDGSYHEDVGYGVSEGLKSKALSLEKARKEAVTDGLKRALRLPLLGVSGRILYSLFSVHSVMCAGGLPTPTASAQTAPSSPCSSAVLRYAQEFWECTWKLYSGQRLPEITK

SEQ ID NO: 324 - protein, 139 aa, Homo sapiens
MSGTEEAILGGRDSHPAAGGGSVLCFGQCQYTAEEYQAIQKALRQRLGPEYISSRMAGGGQKVCYIEGHRVINLANEMFGYNGWAHSITQQNVDFVDLNNGKFYVGVCAFVRVQLKVRGWSRPAARKDQWVVGEGWFIS

SEQ ID NO: 325 - protein, 118 aa, Homo sapiens
MSGTEEAILGGRDSHPAAGGGSVLCFGQCQYTAEEYQAIQKALRQRLGPEYISSRMAGGGQKVCYIEGHRVINLANEMFGYNGWAHSITQQNVGEYALQQWGLLHCPAPAESLLWVRR

SEQ ID NO: 326 - protein, 976 aa, Homo sapiens
MNAGPGCEPCTKRPRWGAATTSPAASDARSFPSRQRRVLDPKDAHVQFRVPPSSPACVPGRAGQHRGSATSLVFKQKTITSWMDTKGIKTAESESLDSKENNNTRIESMMSSVQKDNFYQHNVEKLENVSQLSLDKSPTEKSTQYLNQHQTAAMCKWQNEGKHTEQLLESEPQTVTLVPEQFSNANIDRSPQNDDHSDTDSEENRDNQQFLTTVKLANAKQTTEDEQAREAKSHQKCSKSCDPGEDCASCQQDEIDVVPESPLSDVGSEDVGTGPKNDNKLTRQESCLGNSPPFEKESEPESPMDVDNSKNSCQDSEADEETSPGFDEQEDGSSSQTANKPSRFQARDADIEFRKRYSTKGGEVRLHFQFEGGESRTGMNDLNAKLPGNISSLNVECRNSKQHGKKDSKITDHFMRLPKAEDRRKEQWETKHQRTERKIPKYVPPHLSPDKKWLGTPIEEMRRMPRCGIRLPLLRPSANHTVTIRVDLLRAGEVPKPFPTHYKDLWDNKHVKMPCSEQNLYPVEDENGERTAGSRWELIQTALLNKFTRPQNLKDAILKYNVAYSKKWDFTALIDFWDKVLEEAEAQHLYQSILPDMVKIALCLPNICTQPIPLLKQKMNHSITMSQEQIASLLANAFFCTFPRRNAKMKSEYSSYPDINFNRLFEGRSSRKPEKLKTLFCYFRRVTEKKPTGLVTFTRQSLEDFPEWERCEKPLTRLHVTYEGTIEENGQGMLQVDFANRFVGGGVTSAGLVQEEIRFLINPELIISRLFTEVLDHNECLIITGTEQYSEYTGYAETYRWSRSHEDGSERDDWQRRCTEIVAIDALHFRRYLDQFVPEKMRRELNKAYCGFLRPGVSSENLSAVATGNWGCGAFGGDARLKALIQILAAAAAERDVVYFTFGDSELMRDIYSMHIFLTERKLTVGDVYKLLLRYYNEECRNCSTPGPDIKLYPFIYHAVESCAETADHSGQRTGT

SEQ ID NO: 327 - protein, 894 aa, Homo sapiens
MDTKGIKTAESESLDSKENNNTRIESMMSSVQKDNFYQHNVEKLENVSQLSLDKSPTEKSTQYLNQHQTAAMCKWQNEGKHTEQLLESEPQTVTLVPEQFSNANIDRSPQNDDHSDTDSEENRDNQQFLTTVKLANAKQTTEDEQAREAKSHQKCSKSCDPGEDCASCQQDEIDVVPESPLSDVGSEDVGTGPKNDNKLTRQESCLGNSPPFEKESEPESPMDVDNSKNSCQDSEADEETSPGFDEQEDGSSSQTANKPSRFQARDADIEFRKRYSTKGGEVRLHFQFEGGESRTGMNDLNAKLPGNISSLNVECRNSKQHGKKDSKITDHFMRLPKAEDRRKEQWETKHQRTERKIPKYVPPHLSPDKKWLGTPIEEMRRMPRCGIRLPLLRPSANHTVTIRVDLLRAGEVPKPFPTHYKDLWDNKHVKMPCSEQNLYPVEDENGERTAGSRWELIQTALLNKFTRPQNLKDAILKYNVAYSKKWDFTALIDFWDKVLEEAEAQHLYQSILPDMVKIALCLPNICTQPIPLLKQKMNHSITMSQEQIASLLANAFFCTFPRRNAKMKSEYSSYPDINFNRLFEGRSSRKPEKLKTLFCYFRRVTEKKPTGLVTFTRQSLEDFPEWERCEKPLTRLHVTYEGTIEENGQGMLQVDFANRFVGGGVTSAGLVQEEIRFLINPELIISRLFTEVLDHNECLIITGTEQYSEYTGYAETYRWSRSHEDGSERDDWQRRCTEIVAIDALHFRRYLDQFVPEKMRRELNKAYCGFLRPGVSSENLSAVATGNWGCGAFGGDARLKALIQILAAAAAERDVVYFTFGDSELMRDIYSMHIFLTERKLTVGDVYKLLLRYYNEECRNCSTPGPDIKLYPFIYHAVESCAETADHSGQRTGT

SEQ ID NO: 328 - protein, 868 aa, Homo sapiens
MMSSVQKDNFYQHNVEKLENVSQLSLDKSPTEKSTQYLNQHQTAAMCKWQNEGKHTEQLLESEPQTVTLVPEQFSNANIDRSPQNDDHSDTDSEENRDNQQFLTTVKLANAKQTTEDEQAREAKSHQKCSKSCDPGEDCASCQQDEIDVVPESPLSDVGSEDVGTGPKNDNKLTRQESCLGNSPPFEKESEPESPMDVDNSKNSCQDSEADEETSPGFDEQEDGSSSQTANKPSRFQARDADIEFRKRYSTKGGEVRLHFQFEGGESRTGMNDLNAKLPGNISSLNVECRNSKQHGKKDSKITDHFMRLPKAEDRRKEQWETKHQRTERKIPKYVPPHLSPDKKWLGTPIEEMRRMPRCGIRLPLLRPSANHTVTIRVDLLRAGEVPKPFPTHYKDLWDNKHVKMPCSEQNLYPVEDENGERTAGSRWELIQTALLNKFTRPQNLKDAILKYNVAYSKKWDFTALIDFWDKVLEEAEAQHLYQSILPDMVKIALCLPNICTQPIPLLKQKMNHSITMSQEQIASLLANAFFCTFPRRNAKMKSEYSSYPDINFNRLFEGRSSRKPEKLKTLFCYFRRVTEKKPTGLVTFTRQSLEDFPEWERCEKPLTRLHVTYEGTIEENGQGMLQVDFANRFVGGGVTSAGLVQEEIRFLINPELIISRLFTEVLDHNECLIITGTEQYSEYTGYAETYRWSRSHEDGSERDDWQRRCTEIVAIDALHFRRYLDQFVPEKMRRELNKAYCGFLRPGVSSENLSAVATGNWGCGAFGGDARLKALIQILAAAAAERDVVYFTFGDSELMRDIYSMHIFLTERKLTVGDVYKLLLRYYNEECRNCSTPGPDIKLYPFIYHAVESCAETADHSGQRTGT

SEQ ID NO: 329 - protein, 527 aa, Homo sapiens
MVQAGAEKDAQSISLRKEQWETKHQRTERKIPKYVPPHLSPDKKWLGTPIEEMRRMPRCGIRLPLLRPSANHTVTIWNGERTAGSRWELIQTALLNKFTRPQNLKDAILKYNVAYSKKWDFTALIDFWDKVLEEAEAQHLYQSILPDMVKIALCLPNICTQPIPLLKQKMNHSITMSQEQIASLLANAFFCTFPRRNAKMKSEYSSYPDINFNRLFEGRSSRKPEKLKTLFCYFRRVTEKKPTGLVTFTRQSLEDFPEWERCEKPLTRLHVTYEGTIEENGQGMLQVDFANRFVGGGVTSAGLVQEEIRFLINPELIISRLFTEVLDHNECLIITGTEQYSEYTGYAETYRWSRSHEDGSERDDWQRRCTEIVAIDALHFRRYLDQFVPEKMRRELNKAYCGFLRPGVSSENLSAVATGNWGCGAFGGDARLKALIQILAAAAAERDVVYFTFGDSELMRDIYSMHIFLTERKLTVGDVYKLLLRYYNEECRNCSTPGPDIKLYPFIYHAVESCAETADHSGQRTGT

SEQ ID NO: 330 - protein, 475 aa, Homo sapiens
MRRMPRCGIRLPLLRPSANHTVTIWNGERTAGSRWELIQTALLNKFTRPQNLKDAILKYNVAYSKKWDFTALIDFWDKVLEEAEAQHLYQSILPDMVKIALCLPNICTQPIPLLKQKMNHSITMSQEQIASLLANAFFCTFPRRNAKMKSEYSSYPDINFNRLFEGRSSRKPEKLKTLFCYFRRVTEKKPTGLVTFTRQSLEDFPEWERCEKPLTRLHVTYEGTIEENGQGMLQVDFANRFVGGGVTSAGLVQEEIRFLINPELIISRLFTEVLDHNECLIITGTEQYSEYTGYAETYRWSRSHEDGSERDDWQRRCTEIVAIDALHFRRYLDQFVPEKMRRELNKAYCGFLRPGVSSENLSAVATGNWGCGAFGGDARLKALIQILAAAAAERDVVYFTFGDSELMRDIYSMHIFLTERKLTVGDVYKLLLRYYNEECRNCSTPGPDIKLYPFIYHAVESCAETADHSGQRTGT

SEQ ID NO: 331 - protein, 2286 aa, Homo sapiens
MSLRSGGRRRADPGADGEASRDDGATSSVSALKRLERSQWTDKMDLRFGFERLKEPGEKTGWLINMHPTEILDEDKRLGSAVDYYFIQDDGSRFKVALPYKPYFYIATRKGCEREVSSFLSKKFQGKIAKVETVPKEDLDLPNHLVGLKRNYIRLSFHTVEDLVKVRKEISPAVKKNREQDHASDAYTALLSSVLQRGGVITDEEETSKKIADQLDNIVDMREYDVPYHIRLSIDLKIHVAHWYNVRYRGNAFPVEITRRDDLVERPDPVVLAFDIETTKLPLKFPDAETDQIMMISYMIDGQGYLITNREIVSEDIEDFEFTPKPEYEGPFCVFNEPDEAHLIQRWFEHVQETKPTIMVTYNGDFFDWPFVEARAAVHGLSMQQEIGFQKDSQGEYKAPQCIHMDCLRWVKRDSYLPVGSHNLKAAAKAKLGYDPVELDPEDMCRMATEQPQTLATYSVSDAVATYYLYMKYVHPFIFALCTIIPMEPDEVLRKGSGTLCEALLMVQAFHANIIFPNKQEQEFNKLTDDGHVLDSETYVGGHVEALESGVFRSDIPCRFRMNPAAFDFLLQRVEKTLRHALEEEEKVPVEQVTNFEEVCDEIKSKLASLKDVPSRIECPLIYHLDVGAMYPNIILTNRLQPSAMVDEATCAACDFNKPGANCQRKMAWQWRGEFMPASRSEYHRIQHQLESEKFPPLFPEGPARAFHELSREEQAKYEKRRLADYCRKAYKKIHITKVEERLTTICQRENSFYVDTVRAFRDRRYEFKGLHKVWKKKLSAAVEVGDAAEVKRCKNMEVLYDSLQLAHKCILNSFYGYVMRKGARWYSMEMAGIVCFTGANIITQARELIEQIGRPLELDTDGIWCVLPNSFPENFVFKTTNVKKPKVTISYPGAMLNIMVKEGFTNDQYQELAEPSSLTYVTRSENSIFFEVDGPYLAMILPASKEEGKKLKKRYAVFNEDGSLAELKGFEVKRRGELQLIKIFQSSVFEAFLKGSTLEEVYGSVAKVADYWLDVLYSKAANMPDSELFELISENRSMSRKLEDYGEQKSTSISTAKRLAEFLGDQMVKDAGLSCRYIISRKPEGSPVTERAIPLAIFQAEPTVRKHFLRKWLKSSSLQDFDIRAILDWDYYIERLGSAIQKIITIPAALQQVKNPVPRVKHPDWLHKKLLEKNDVYKQKKISELFTLEGRRQVTMAEASEDSPRPSAPDMEDFGLVKLPHPAAPVTVKRKRVLWESQEESQDLTPTVPWQEILGQPPALGTSQEEWLVWLRFHKKKWQLQARQRLARRKRQRLESAEGVLRPGAIRDGPATGLGSFLRRTARSILDLPWQIVQISETSQAGLFRLWALVGSDLHCIRLSIPRVFYVNQRVAKAEEGASYRKVNRVLPRSNMVYNLYEYSVPEDMYQEHINEINAELSAPDIEGVYETQVPLLFRALVHLGCVCVVNKQLVRHLSGWEAETFALEHLEMRSLAQFSYLEPGSIRHIYLYHHAQAHKALFGIFIPSQRRASVFVLDTVRSNQMPSLGALYSAEHGLLLEKVGPELLPPPKHTFEVRAETDLKTICRAIQRFLLAYKEERRGPTLIAVQSSWELKRLASEIPVLEEFPLVPICVADKINYGVLDWQRHGARRMIRHYLNLDTCLSQAFEMSRYFHIPIGNLPEDISTFGSDLFFARHLQRHNHLLWLSPTARPDLGGKEADDNCLVMEFDDQATVEINSSGCYSTVCVELDLQNLAVNTILQSHHVNDMEGADSMGISFDVIQQASLEDMITGGQAASAPASYDETALCSNTFRILKSMVVGWVKEITQYHNIYADNQVMHFYRWLRSPSSLLHDPALHRTLHNMMKKLFLQLIAEFKRLGSSVIYANFNRIILCTKKRRVEDAIAYVEYITSSIHSKETFHSLTISFSRCWEFLLWMDPSNYGGIKGKVSSRIHCGLQDSQKAGGAEDEQENEDDEEERDGEEEEEAEESNVEDLLENNWNILQFLPQAASCQNYFLMIVSAYIVAVYHCMKDGLRRSAPGSTPVRRRGASQLSQEAEGAVGALPGMITFSQDYVANELTQSFFTITQKIQKKVTGSRNSTELSEMFPVLPGSHLLLNNPALEFIKYVCKVLSLDTNITNQVNKLNRDLLRLVDVGEFSEEAQFRDPCRSYVLPEVICRSCNFCRDLDLCKDSSFSEDGAVLPQWLCSNCQAPYDSSAIEMTLVEVLQKKLMAFTLQDLVCLKCRGVKETSMPVYCSCAGDFALTIHTQVFMEQIGIFRNIAQHYGMSYLLETLEWLLQKNPQLGH

SEQ ID NO: 332 - protein, 469 aa, Homo sapiens
MFSEQAAQRAHTLLSPPSANNATFARVPVATYTNSSQPFRLGERSFSRQYAHIYATRLIQMRPFLENRAQQHWGSGVGVKKLCELQPEEKCCVVGTLFKAMPLQPSILREVSEEHNLLPQPPRSKYIHPDDELVLEDELQRIKLKGTIDVSKLVTGTVLAVFGSVRDDGKFLVEDYCFADLAPQKPAPPLDTDRFVLLVSGLGLGGGGGESLLGTQLLVDVVTGQLGDEGEQCSAAHVSRVILAGNLLSHSTQSRDSINKAKYLTKKTQAASVEAVKMLDEILLQLSASVPVDVMPGEFDPTNYTLPQQPLHPCMFPLATAYSTLQLVTNPYQATIDGVRFLGTSGQNVSDIFRYSSMEDHLEILEWTLRVRHISPTAPDTLGCYPFYKTDPFIFPECPHVYFCGNTPSFGSKIIRGPEDQTVLLVTVPDFSATQTACLVNLRSLACQPISFSGFGAEDDDLGGLGLGP

SEQ ID NO: 333 - protein, 504 aa, Homo sapiens
MGGAGARGLAGCGAPRVNLLGLGEAVWTKQVRSVAMFSEQAAQRAHTLLSPPSANNATFARVPVATYTNSSQPFRLGERSFSRQYAHIYATRLIQMRPFLENRAQQHWGSGVGVKKLCELQPEEKCCVVGTLFKAMPLQPSILREVSEEHNLLPQPPRSKYIHPDDELVLEDELQRIKLKGTIDVSKLVTGTVLAVFGSVRDDGKFLVEDYCFADLAPQKPAPPLDTDRFVLLVSGLGLGGGGGESLLGTQLLVDVVTGQLGDEGEQCSAAHVSRVILAGNLLSHSTQSRDSINKAKYLTKKTQAASVEAVKMLDEILLQLSASVPVDVMPGEFDPTNYTLPQQPLHPCMFPLATAYSTLQLVTNPYQATIDGVRFLGTSGQNVSDIFRYSSMEDHLEILEWTLRVRHISPTAPDTLGCYPFYKTDPFIFPECPHVYFCGNTPSFGSKIIRGPEDQTVLLVTVPDFSATQTACLVNLRSLACQPISFSGFGAEDDDLGGLGLGP

SEQ ID NO: 334 - protein, 466 aa, Homo sapiens
MADQLYLENIDEFVTDQNKIVTYKWLSYTLGVHVNQAKQMLYDYVERKRKENSGAQLHVTYLVSGSLIQNGHSCHKVAVVREDKLEAVKSKLAVTASIHVYSIQKAMLKDSGPLFNTDYDILKSNLQNCSKFSAIQCAAAVPRAPAESSSSSKKFEQSHLHMSSETQANNELTTNGHGPPASKQVSQQPKGIMGMFASKAAAKTQETNKETKTEAKEVTNASAAGNKAPGKGNMMSNFFGKAAMNKFKVNLDSEQAVKEEKIVEQPTVSVTEPKLATPAGLKKSSKKAEPVKVLQKEKKRGKRVALSDDETKETENMRKKRRRIKLPESDSSEDEVFPDSPGAYEAESPSPPPPPSPPLEPVPKTEPEPPSVKSSSGENKRKRKRVLKSKTYLDGEGCIVTEKVYESESCTDSEEELNMKTSSVHRPPAMTVKKEPREERKGPKKGTAALGKANRQVSITGFFQRK

SEQ ID NO: 335 - protein, 2286 aa, Homo sapiens; identical to SEQ ID NO: 331

SEQ ID NO: 336 - protein, 261 aa, Homo sapiens
MFEARLVQGSILKKVLEALKDLINEACWDISSSGVNLQSMDSSHVSLVQLTLRSEGFDTYRCDRNLAMGVNLTSMSKILKCAGNEDIITLRAEDNADTLALVFEAPNQEKVSDYEMKLMDLDVEQLGIPEQEYSCVVKMPSGEFARICRDLSHIGDAVVISCAKDGVKFSASGELGNGNIKLSQTSNVDKEEEAVTIEMNEPVQLTFALRYLNFFTKATPLSSTVTLSMSADVPLVVEYKIADMGHLKYYLAPKIEDEEGS

SEQ ID NO: 337 - protein, 318 aa, Homo sapiens
MPKRGKKGAVAEDGDELRTEPEAKKSKTAAKKNDKEAAGEGPALYEDPPDQKTSPSGKPATLKICSWNVDGLRAWIKKKGLDWVKEEAPDILCLQETKCSENKLPAELQELPGLSHQYWSAPSDKEGYSGVGLLSRQCPLKVSYGIGDEEHDQEGRVIVAEFDSFVLVTAYVPNAGRGLVRLEYRQRWDEAFRKFLKGLASRKPLVLCGDLNVAHEEIDLRNPKGNKKNAGFTPQERQGFGELLQAVPLADSFRHLYPNTPYAYTFWTYMMNARSKNVGWRLDYFLLSHSLLPALCDSKIRSKALGSDHCPITLYLAL

SEQ ID NO: 338 - protein, 342 aa, Homo sapiens
MMRVCWLVRQDSRHQRIRLPHLEAVVIGRGPETKITDKKCSRQQVQLKAECNKGYVKVKQVGVNPTSIDSVVIGKDQEVKLQPGQVLHMVNELYPYIVEFEEEAKNPGLETHRKRKRSGNSDSIERDAAQEAEAGTGLEPGSNSGQCSVPLKKGKDAPIKKESLGHWSQGLKISMQDPKMQVYKDEQVVVIKDKYPKARYHWLVLPWTSISSLKAVAREHLELLKHMHTVGEKVIVDFAGSSKLRFRLGYHAIPSMSHVHLHVISQDFDSPCLKNKKHWNSFNTEYFLESQAVIEMVQEAGRVTVRDGMPELLKLPLRCHECQQLLPSIPQLKEHLRKHWTQ

SEQ ID NO: 339 - protein, 30 aa, synthetic construct
  REGION 1..30: note = Synthetic
  VARIANT 1..30: note = misc_feature - This sequence may encompass 1-10 GGS repeating units
GGSGGSGGSGGSGGSGGSGGSGGSGGSGGS

SEQ ID NO: 340 - protein, 302 aa, Homo sapiens
MSNVNLSVSDFWRVMMRVCWLVRQDSRHQRIRLPHLEAVVIGRGPETKITDKKCSRQQEFEEEAKNPGLETHRKRKRSGNSDSIERDAAQEAEAGTGLEPGSNSGQCSVPLKKGKDAPIKKESLGHWSQGLKISMQDPKMQVYKDEQVVVIKDKYPKARYHWLVLPWTSISSLKAVAREHLELLKHMHTVGEKVIVDFAGSSKLRFRLGYHAIPSMSHVHLHVISQDFDSPCLKNKKHWNSFNTEYFLESQAVIEMVQEAGRVTVRDGMPELLKLPLRCHECQQLLPSIPQLKEHLRKHWTQ

SEQ ID NO: 341 - protein, 20 aa, synthetic construct
  REGION 1..20: note = Synthetic
  VARIANT 1..20: note = misc_feature - This sequence may encompass 1-10 GS repeating units
GSGSGSGSGSGSGSGSGSGS

SEQ ID NO: 342 - protein, 288 aa, Homo sapiens
MMRVCWLVRQDSRHQRIRLPHLEAVVIGRGPETKITDKKCSRQQEFEEEAKNPGLETHRKRKRSGNSDSIERDAAQEAEAGTGLEPGSNSGQCSVPLKKGKDAPIKKESLGHWSQGLKISMQDPKMQVYKDEQVVVIKDKYPKARYHWLVLPWTSISSLKAVAREHLELLKHMHTVGEKVIVDFAGSSKLRFRLGYHAIPSMSHVHLHVISQDFDSPCLKNKKHWNSFNTEYFLESQAVIEMVQEAGRVTVRDGMPELLKLPLRCHECQQLLPSIPQLKEHLRKHWTQ

SEQ ID NO: 343 - protein, 511 aa, Homo sapiens; identical to SEQ ID NO: 295

SEQ ID NO: 344 - protein, 64 aa, synthetic construct
  REGION 1..64: note = Synthetic
  VARIANT 1..64: note = This sequence may encompass 1-4 SGSETPGTSESATPES repeating units
SGSETPGTSESATPESSGSETPGTSESATPESSGSETPGTSESATPESSGSETPGTSESATPES

SEQ ID NO: 345 - protein, 48 aa, synthetic construct; identical to SEQ ID NO: 201
  REGION 1..48: note = Synthetic
  VARIANT 1..48: note = misc_feature - This sequence may encompass 1-4 GSAGSAAGSGEF repeating units

SEQ ID NO: 346 - protein, 48 aa, synthetic construct; identical to SEQ ID NO: 202
  REGION 1..48: note = Synthetic
  VARIANT 1..48: note = misc_feature - This sequence may encompass 1-4 SIVAQLSRPDPA repeating units

SEQ ID NO: 347 - protein, 298 aa, Homo sapiens
MSQEGDYGRWTISSSDESEEEKPKPDKPSTSSLLCARQGAANEPRYTCSEAQKAAHKRKISPVKFSNTDSVLPPKRQKSGSQEDLGWCLSSSDDELQPEMPQKQAEKVVIKKEKDISAPNDGTAQRTENHGAPACHRLKEEEDEYETSGEGQDIWDMLDKGNPFQFYLTRVSGVKPKYNSGALHIKDILSPLFGTLVSSAQFNYCFDVDWLVKQYPPEFRKKPILLVHGDKREAKAHLHAQAKPYENISLCQAKLDIAFGTHHTKMMLLLYEEGLRVVIHTSNLIHADWHQKTQGTHL

SEQ ID NO: 348 - protein, 934 aa, Homo sapiens [sequence omitted]

SEQ ID NO: 349 - protein, 868 aa, Homo sapiens
MGPAGAKNLQSVVLSKMNFESFVKDLLLVRQYRVEVYKNRAGNKASKENDWYLAYKASPGNLSQFEDILFGNNDMSASIGVVGVKMSAVDGQRQVGVGYVDSIQRKLGLCEFPDNDQFSNLEALLIQIGPKECVLPGGETAGDMGKLRQIIQRGGILITERKKADFSTKDIYQDLNRLLKGKKGEQMNSAVLPEMENQVAVSSLSAVIKFLELLSDDSNFGQFELTTFDFSQYMKLDIAAVRALNLFQGSVEDTTGSQSLAALLNKCKTPQGQRLVNQWIKQPLMDKNRIEERLNLVEAFVEDAELRQTLQEDLLRRFPDLNRLAKKFQRQAANLQDCYRLYQGINQLPNVIQALEKHEGKHQKLLLAVFVTPLTDLRSDFSKFQEMIETTLDMDQVENHEFLVKPSFDPNLSELREIMNDLEKKMQSTLISAARDLGLDPGKQIKLDSSAQFGYYFRVTCKEEKVLRNNKNFSTVDIQKNGVKFTNSKLTSLNEEYTKNKTEYEEAQDAIVKEIVNISSGYVEPMQTLNDVLAQLDAVVSFAHVSNGAPVPYVRPAILEKGQGRIILKASRHACVEVQDEIAFIPNDVYFEKDKQMFHIITGPNMGGKSTYIRQTGVIVLMAQIGCFVPCESAEVSIVDCILARVGAGDSQLKGVSTFMAEMLETASILRSATKDSLIIIDELGRGTSTYDGFGLAWAISEYIATKIGAFCMFATHFHELTALANQIPTVNNLHVTALTTEETLTMLYQVKKGVCDQSFGIHVAELANFPKHVIECAKQKALELEEFQYIGESQGYDIMEPAAKKCYLEREQGEKIIQEFLSKVKQMPFTEMSEENITIKLKQLKAEVIAKNNSFVNEIISRIKVTT

SEQ ID NO: 350 - protein, 1137 aa, Homo sapiens
MSRRKPASGGLAASSSAPARQAVLSRFFQSTGSLKSTSSSTGAADQVDPGAAAAAAAAAAAAPPAPPAPAFPPQLPPHIATEIDRRKKRPLENDGPVKKKVKKVQQKEGGSDLGMSGNSEPKKCLRTRNVSKSLEKLKEFCCDSALPQSRVQTESLQERFAVLPKCTDFDDISLLHAKNAVSSEDSKRQINQKDTTLFDLSQFGSSNTSHENLQKTASKSANKRSKSIYTPLELQYIEMKQQHKDAVLCVECGYKYRFFGEDAEIAARELNIYCHLDHNFMTASIPTHRLFVHVRRLVAKGYKVGVVKQTETAALKAIGDNRSSLFSRKLTALYTKSTLIGEDVNPLIKLDDAVNVDEIMTDTSTSYLLCISENKENVRDKKKGNIFIGIVGVQPATGEVVFDSFQDSASRSELETRMSSLQPVELLLPSALSEQTEALIHRATSVSVQDDRIRVERMDNIYFEYSHAFQAVTEFYAKDTVDIKGSQIISGIVNLEKPVICSLAAIIKYLKEFNLEKMLSKPENFKQLSSKMEFMTINGTTLRNLEILQNQTDMKTKGSLLWVLDHTKTSFGRRKLKKWVTQPLLKLREINARLDAVSEVLHSESSVFGQIENHLRKLPDIERGLCSIYHKKCSTQEFFLIVKTLYHLKSEFQAIIPAVNSHIQSDLLRTVILEIPELLSPVEHYLKILNEQAAKVGDKTELFKDLSDFPLIKKRKDEIQGVIDEIRMHLQEIRKILKNPSAQYVTVSGQEFMIEIKNSAVSCIPTDWVKVGSTKAVSRFHSPFIVENYRHLNQLREQLVLDCSAEWLDFLEKFSEHYHSLCKAVHHLATVDCIFSLAKVAKQGDYCRPTVQEERKIVIKNGRHPVIDVLLGEQDQYVPNNTDLSEDSERVMIITGPNMGGKSSYIKQVALITIMAQIGSYVPAEEATIGIVDGIFTRMGAADNIYKGQSTFMEELTDTAEIIRKATSQSLVILDELGRGTSTHDGIAIAYATLEYFIRDVKSLTLFVTHYPPVCELEKNYSHQVGNYHMGFLVSEDESKLDPGAAEQVPDFVTFLYQITRGIAARSYGLNVAKLADVPGEILKKAAHKSKELEGLINTKRKRLKYFAKLWTMHNAQDLQKWTEEFNMEETQTSLLH

SEQ ID NO: 351 - protein, 1360 aa, Homo sapiens
MSRQSTLYSFFPKSPALSDANKASARASREGGRAAAAPGASPSPGGDAAWSEAGPGPRPLARSASPPKAKNLNGGLRRSVAPAAPTSCDFSPGDLVWAKMEGYPWWPCLVYNHPFDGTFIREKGKSVRVHVQFFDDSPTRGWVSKRLLKPYTGSKSKEAQKGGHFYSAKPEILRAMQRADEALNKDKIKRLELAVCDEPSEPEEEEEMEVGTTYVTDKSEEDNEIESEEEVQPKTQGSRRSSRQIKKRRVISDSESDIGGSDVEFKPDTKEEGSSDEISSGVGDSESEGLNSPVKVARKRKRMVTGNGSLKRKSSRKETPSATKQATSISSETKNTLRAFSAPQNSESQAHVSGGGDDSSRPTVWYHETLEWLKEEKRRDEHRRRPDHPDFDASTLYVPEDFLNSCTPGMRKWWQIKSQNFDLVICYKVGKFYELYHMDALIGVSELGLVFMKGNWAHSGFPEIAFGRYSDSLVQKGYKVARVEQTETPEMMEARCRKMAHISKYDRVVRREICRIITKGTQTYSVLEGDPSENYSKYLLSLKEKEEDSSGHTRAYGVCFVDTSLGKFFIGQFSDDRHCSRFRTLVAHYPPVQVLFEKGNLSKETKTILKSSLSCSLQEGLIPGSQFWDASKTLRTLLEEEYFREKLSDGIGVMLPQVLKGMTSESDSIGLTPGEKSELALSALGGCVFYLKKCLIDQELLSMANFEEYIPLDSDTVSTTRSGAIFTKAYQRMVLDAVTLNNLEIFLNGTNGSTEGTLLERVDTCHTPFGKRLLKQWLCAPLCNHYAINDRLDAIEDLMVVPDKISEVVELLKKLPDLERLLSKIHNVGSPLKSQNHPDSRAIMYEETTYSKKKIIDFLSALEGFKVMCKIIGIMEEVADGFKSKILKQVISLQTKNPEGRFPDLTVELNRWDTAFDHEKARKTGLITPKAGFDSDYDQALADIRENEQSLLEYLEKQRNRIGCRTIVYWGIGRNRYQLEIPENFTTRNLPEEYELKSTKKGCKRYWTKTIEKKLANLINAEERRDVSLKDCMRRLFYNFDKNYKDWQSAVECIAVLDVLLCLANYSRGGDGPMCRPVILLPEDTPPFLELKGSRHPCITKTFFGDDFIPNDILIGCEEEEQENGKAYCVLVTGPNMGGKSTLMRQAGLLAVMAQMGCYVPAEVCRLTPIDRVFTRLGASDRIMSGESTFFVELSETASILMHATAHSLVLVDELGRGTATFDGTAIANAVVKELAETIKCRTLFSTHYHSLVEDYSQNVAVRLGHMACMVENECEDPSQETITFLYKFIKGACPKSYGFNAARLANLPEEVIQKGHRKAREFEKMNQSLRLFREVCLASERSTVDAEAVHKLLTLIKEL

SEQ ID NO: 352 - protein, 756 aa, Homo sapiens
MSFVAGVIRRLDETVVNRIAAGEVIQRPANAIKEMIENCLDAKSTSIQVIVKEGGLKLIQIQDNGTGIRKEDLDIVCERFTTSKLQSFEDLASISTYGFRGEALASISHVAHVTITTKTADGKCAYRASYSDGKLKAPPKPCAGNQGTQITVEDLFYNIATRRKALKNPSEEYGKILEVVGRYSVHNAGISFSVKKQGETVADVRTLPNASTVDNIRSIFGNAVSRELIEIGCEDKTLAFKMNGYISNANYSVKKCIFLLFINHRLVESTSLRKAIETVYAAYLPKNTHPFLYLSLEISPQNVDVNVHPTKHEVHFLHEESILERVQQHIESKLLGSNSSRMYFTQTLLPGLAGPSGEMVKSTTSLTSSSTSGSSDKVYAHQMVRTDSREQKLDAFLQPLSKPLSSQPQAIVTEDKTDISSGRARQQDEEMLELPAPAEVAAKNQSLEGDTTKGTSEMSEKRGPTSSNPRKRHREDSDVEMVEDDSRKEMTAACTPRRRIINLTSVLSLQEEINEQGHEVLREMLHNHSFVGCVNPQWALAQHQTKLYLLNTTKLSEELFYQILIYDFANFGVLRLSEPAPLFDLAMLALDSPESGWTEEDGPKEGLAEYIVEFLKKKAEMLADYFSLEIDEEGNLIGLPLLIDNYVPPLEGLPIFILRLATEVNWDEEKECFESLSKECAMFYSIRKQYISEESTLSGQQSEVPGSIPNSWKWTVEHIVYKALRSHILPPKHFTEDGNILQLANLPDLYKVFERC

SEQ ID NO: 353 - protein, 515 aa, Homo sapiens
MNGYISNANYSVKKCIFLLFINHRLVESTSLRKAIETVYAAYLPKNTHPFLYLSLEISPQNVDVNVHPTKHEVHFLHEESILERVQQHIESKLLGSNSSRMYFTQTLLPGLAGPSGEMVKSTTSLTSSSTSGSSDKVYAHQMVRTDSREQKLDAFLQPLSKPLSSQPQAIVTEDKTDISSGRARQQDEEMLELPAPAEVAAKNQSLEGDTTKGTSEMSEKRGPTSSNPRKRHREDSDVEMVEDDSRKEMTAACTPRRRIINLTSVLSLQEEINEQGHEVLREMLHNHSFVGCVNPQWALAQHQTKLYLLNTTKLSEELFYQILIYDFANFGVLRLSEPAPLFDLAMLALDSPESGWTEEDGPKEGLAEYIVEFLKKKAEMLADYFSLEIDEEGNLIGLPLLIDNYVPPLEGLPIFILRLATEVNWDEEKECFESLSKECAMFYSIRKQYISEESTLSGQQSEVPGSIPNSWKWTVEHIVYKALRSHILPPKHFTEDGNILQLANLPDLYKVFERC

SEQ ID NO: 354 - protein, 658 aa, Homo sapiens
MAFEALASISHVAHVTITTKTADGKCAYRASYSDGKLKAPPKPCAGNQGTQITVEDLFYNIATRRKALKNPSEEYGKILEVVGRYSVHNAGISFSVKKQGETVADVRTLPNASTVDNIRSIFGNAVSRELIEIGCEDKTLAFKMNGYISNANYSVKKCIFLLFINHRLVESTSLRKAIETVYAAYLPKNTHPFLYLSLEISPQNVDVNVHPTKHEVHFLHEESILERVQQHIESKLLGSNSSRMYFTQTLLPGLAGPSGEMVKSTTSLTSSSTSGSSDKVYAHQMVRTDSREQKLDAFLQPLSKPLSSQPQAIVTEDKTDISSGRARQQDEEMLELPAPAEVAAKNQSLEGDTTKGTSEMSEKRGPTSSNPRKRHREDSDVEMVEDDSRKEMTAACTPRRRIINLTSVLSLQEEINEQGHEVLREMLHNHSFVGCVNPQWALAQHQTKLYLLNTTKLSEELFYQILIYDFANFGVLRLSEPAPLFDLAMLALDSPESGWTEEDGPKEGLAEYIVEFLKKKAEMLADYFSLEIDEEGNLIGLPLLIDNYVPPLEGLPIFILRLATEVNWDEEKECFESLSKECAMFYSIRKQYISEESTLSGQQSEVPGSIPNSWKWTVEHIVYKALRSHILPPKHFTEDGNILQLANLPDLYKVFERC

SEQ ID NO: 355 - protein, 862 aa, Homo sapiens
MERAESSSTEPAKAIKPIDRKSVHQICSGQVVLSLSTAVKELVENSLDAGATNIDLKLKDYGVDLIEVSDNGCGVEEENFEGLTLKHHTSKIQEFADLTQVETFGFRGEALSSLCALSDVTISTCHASAKVGTRLMFDHNGKIIQKTPYPRPRGTTVSVQQLFSTLPVRHKEFQRNIKKEYAKMVQVLHAYCIISAGIRVSCTNQLGQGKRQPVVCTGGSPSIKENIGSVFGQKQLQSLIPFVQLPPSDSVCEEYGLSCSDALHNLFYISGFISQCTHGVGRSSTDRQFFFINRRPCDPAKVCRLVNEVYHMYNRHQYPFVVLNISVDSECVDINVTPDKRQILLQEEKLLLAVLKTSLIGMFDSDVNKLNVSQQPLLDVEGNLIKMHAADLEKPMVEKQDQSPSLRTGEEKKDVSISRLREAFSLRHTTENKPHSPKTPEPRRSPLGQKRGMLSSSTSGAISDKGVLRPQKEAVSSSHGPSDPTDRAEVEKDSGHGSTSVDSEGFSIPDTGSHCSSEYAASSPGDRGSQEHVDSQEKAPKTDDSFSDVDCHSNQEDTGCKFRVLPQPTNLATPNTKRFKKEEILSSSDICQKLVNTQDMSASQVDVAVKINKKVVPLDFSMSSLAKRIKQLHHEAQQSEGEQNYRKFRAKICPGENQAAEDELRKEISKTMFAEMEIIGQFNLGFIITKLNEDIFIVDQHATDEKYNFEMLQQHTVLQGQRLIAPQTLNLTAVNEAVLIENLEIFRKNGFDFVIDENAPVTERAKLISLPTSKNWTFGPQDVDELIFMLSDSPGVMCRPSRVKQMFASRACRKSVMIGTALNTSEMKKLITHMGEMDHPWNCPHGRPTMRHIANLGVISQN

SEQ ID NO: 356 - protein, 461 aa, Homo sapiens
MERAESSSTEPAKAIKPIDRKSVHQICSGQVVLSLSTAVKELVENSLDAGATNIDLKLKDYGVDLIEVSDNGCGVEEENFEGLTLKHHTSKIQEFADLTQVETFGFRGEALSSLCALSDVTISTCHASAKVGTRLMFDHNGKIIQKTPYPRPRGTTVSVQQLFSTLPVRHKEFQRNIKKEYAKMVQVLHAYCIISAGIRVSCTNQLGQGKRQPVVCTGGSPSIKENIGSVFGQKQLQSLIPFVQLPPSDSVCEEYGLSCSDALHNLFYKTMFAEMEIIGQFNLGFIITKLNEDIFIVDQHATDEKYNFEMLQQHTVLQGQRLIAPQTLNLTAVNEAVLIENLEIFRKNGFDFVIDENAPVTERAKLISLPTSKNWTFGPQDVDELIFMLSDSPGVMCRPSRVKQMFASRACRKSVMIGTALNTSEMKKLITHMGEMDHPWNCPHGRPTMRHIANLGVISQN

SEQ ID NO: 357 - protein, 572 aa, Homo sapiens
MERAESSSTEPAKAIKPIDRKSVHQICSGQVVLSLSTAVKELVENSLDAGATNIDLKLKDYGVDLIEVSDNGCGVEEENFEGLTLKHHTSKIQEFADLTQVETFGFRGEALSSLCALSDVTISTCHASAKVGTRLMFDHNGKIIQKTPYPRPRGTTVSVQQLFSTLPVRHKEFQRNIKKEYAKMVQVLHAYCIISAGIRVSCTNQLGQGKRQPVVCTGGSPSIKENIGSVFGQKQLQSLIPFVQLPPSDSVCEEYGLSCSDALHNLFYISGFISQCTHGVGRSSTDRQFFFINRRPCDPAKVCRLVNEVYHMYNRHQYPFVVLNISVDSECVDINVTPDKRQILLQEEKLLLAVLKTSLIGMFDSDVNKLNVSQQPLLDVEGNLIKMHAADLEKPMVEKQDQSPSLRTGEEKKDVSISRLREAFSLRHTTENKPHSPKTPEPRRSPLGQKRGMLSSSTSGAISDKGVLRPQKEAVSSSHGPSDPTDRAEVEKDSGHGSTSVDSEGFSIPDTGSHCSSEYAASSPGDRGSQEHVDSQEKAPKTDDSFSDVDCHSNQEDTGLKTGPSDPRTSMN

SEQ ID NO: 358 - protein, 183 aa, Homo sapiens
MERAESSSTEPAKAIKPIDRKSVHQICSGQVVLSLSTAVKELVENSLDAGATNIDLKLKDYGVDLIEVSDNGCGVEEENFEGLTLKHHTSKIQEFADLTQVETFGFRGEALSSLCALSDVTISTCHASAKVGTRLMFDHNGKIIQKTPYPRPRGTTVSVQQLFSTLPVRHKEFQRNIKKQASV

SEQ ID NO: 359 - protein, 1453 aa, Homo sapiens
MIKCLSVEVQAKLRSGLAISSLGQCVEELALNSIDAEAKCVAVRVNMETFQVQVIDNGFGMGSDDVEKVGNRYFTSKCHSVQDLENPRFYGFRGEALANIADMASAVEISSKKNRTMKTFVKLFQSGKALKACEADVTRASAGTTVTVYNLFYQLPVRRKCMDPRLEFEKVRQRIEALSLMHPSISFSLRNDVSGSMVLQLPKTKDVCSRFCQIYGLGKSQKLREISFKYKEFELSGYISSEAHYNKNMQFLFVNKRLVLRTKLHKLIDFLLRKESIICKPKNGPTSRQMNSSLRHRSTPELYGIYVINVQCQFCEYDVCMEPAKTLIEFQNWDTLLFCIQEGVKMFLKQEKLFVELSGEDIKEFSEDNGFSLFDATLQKRVTSDERSNFQEACNNILDSYEMFNLQSKAVKRKTTAENVNTQSSRDSEATRKNTNDAFLYIYESGGPGHSKMTEPSLQNKDSSCSESKMLEQETIVASEAGENEKHKKSFLEHSSLENPCGTSLEMFLSPFQTPCHFEESGQDLEIWKESTTVNGMAANILKNNRIQNQPKRFKDATEVGCQPLPFATTLWGVHSAQTEKEKKKESSNCGRRNVFSYGRVKLCSTGFITHVVQNEKTKSTETEHSFKNYVRPGPTRAQETFGNRTRHSVETPDIKDLASTLSKESGQLPNKKNCRTNISYGLENEPTATYTMFSAFQEGSKKSQTDCILSDTSPSFPWYRHVSNDSRKTDKLIGFSKPIVRKKLSLSSQLGSLEKFKRQYGKVENPLDTEVEESNGVTTNLSLQVEPDILLKDKNRLENSDVCKITTMEHSDSDSSCQPASHILNSEKFPFSKDEDCLEQQMPSLRESPMTLKELSLFNRKPLDLEKSSESLASKLSRLKGSERETQTMGMMSRFNELPNSDSSRKDSKLCSVLTQDFCMLFNNKHEKTENGVIPTSDSATQDNSFNKNSKTHSNSNTTENCVISETPLVLPYNNSKVTGKDSDVLIRASEQQIGSLDSPSGMLMNPVEDATGDQNGICFQSEESKARACSETEESNTCCSDWQRHFDVALGRMVYVNKMTGLSTFIAPTEDIQAACTKDLTTVAVDVVLENGSQYRCQPFRSDLVLPFLPRARAERTVMRQDNRDTVDDTVSSESLQSLFSEWDNPVFARYPEVAVDVSSGQAESLAVKIHNILYPYRFTKGMIHSMQVLQQVDNKFIACLMSTKTEENGEAGGNLLVLVDQHAAHERIRLEQLIIDSYEKQQAQGSGRKKLLSSTLIPPLEITVTEEQRRLLWCYHKNLEDLGLEFVFPDTSDSLVLVGKVPLCFVEREANELRRGRSTVTKSIVEEFIREQLELLQTTGGIQGTLPLTVQKVLASQACHGAIKFNDGLSLQESCRLIEALSSCQLPFQCAHGRPSMLPLADIDHLEQEKQIKPNLTKLRKMAQAWRLFGKAECDTRQSLQQSMPPCEPP

SEQ ID NO: 360 - protein, 1429 aa, Homo sapiens
MIKCLSVEVQAKLRSGLAISSLGQCVEELALNSIDAEAKCVAVRVNMETFQVQVIDNGFGMGSDDVEKVGNRYFTSKCHSVQDLENPRFYGFRGEALANIADMASAVEISSKKNRTMKTFVKLFQSGKALKACEADVTRASAGTTVTVYNLFYQLPVRRKCMDPRLEFEKVRQRIEALSLMHPSISFSLRNDVSGSMVLQLPKTKDVCSRFCQIYGLGKSQKLREISFKYKEFELSGYISSEAHYNKNMQFLFVNKRLVLRTKLHKLIDFLLRKESIICKPKNGPTSRQMNSSLRHRSTPELYGIYVINVQCQFCEYDVCMEPAKTLIEFQNWDTLLFCIQEGVKMFLKQEKLFVELSGEDIKEFSEDNGFSLFDATLQKRVTSDERSNFQEACNNILDSYEMFNLQSKAVKRKTTAENVNTQSSRDSEATRKNTNDAFLYIYESGGPGHSKMTEPSLQNKDSSCSESKMLEQETIVASEAGENEKHKKSFLEHSSLENPCGTSLEMFLSPFQTPCHFEESGQDLEIWKESTTVNGMAANILKNNRIQNQPKRFKDATEVGCQPLPFATTLWGVHSAQTEKEKKKESSNCGRRNVFSYGRVKLCSTGFITHVVQNEKTKSTETEHSFKNYVRPGPTRAQETFGNRTRHSVETPDIKDLASTLSKESGQLPNKKNCRTNISYGLENEPTATYTMFSAFQEGSKKSQTDCILSDTSPSFPWYRHVSNDSRKTDKLIGFSKPIVRKKLSLSSQLGSLEKFKRQYGKVENPLDTEVEESNGVTTNLSLQVEPDILLKDKNRLENSDVCKITTMEHSDSDSSCQPASHILNSEKFPFSKDEDCLEQQMPSLRESPMTLKELSLFNRKPLDLEKSSESLASKLSRLKGSERETQTMGMMSRFNELPNSDSSRKDSKLCSVLTQDFCMLFNNKHEKTENGVIPTSDSATQDNSFNKNSKTHSNSNTTENCVISETPLVLPYNNSKVTGKDSDVLIRASEQQIGSLDSPSGMLMNPVEDATGDQNGICFQSEESKARACSETEESNTCCSDWQRHFDVALGRMVYVNKMTGLSTFIAPTEDIQAACTKDLTTVAVDVVLENGSQYRCQPFRSDLVLPFLPRARAERTVMRQDNRDTVDDTVSSESLQSLFSEWDNPVFARYPEVAVDVSSGQAESLAVKIHNILYPYRFTKGMIHSMQVLQQVDNKFIACLMSTKTEENGEADSYEKQQAQGSGRKKLLSSTLIPPLEITVTEEQRRLLWCYHKNLEDLGLEFVFPDTSDSLVLVGKVPLCFVEREANELRRGRSTVTKSIVEEFIREQLELLQTTGGIQGTLPLTVQKVLASQACHGAIKFNDGLSLQESCRLIEALSSCQLPFQCAHGRPSMLPLADIDHLEQEKQIKPNLTKLRKMAQAWRLFGKAECDTRQSLQQSMPPCEPP

SEQ ID NO: 361 - protein, 215 aa, Homo sapiens
MGKGDPKKPRGKMSSYAFFVQTCREEHKKKHPDASVNFSEFSKKCSERWKTMSAKEKGKFEDMAKADKARYEREMKTYIPPKGETKKKFKDPNAPKRPPSAFFLFCSEYRPKIKGEHPGLSIGDVAKKLGEMWNNTAADDKQPYEKKAAKLKEKYEKDIAAYRAKGKPDAAKKGVVKAEKSKKKKEEEEDEEDEEDEEEEEDEEDEDEEEDDDDE

SEQ ID NO: 362 - protein, 158 aa, Homo sapiens
MGKGDPKKPRGKMSSYAFFVQTCREEHKKKHPDASVNFSEFSKKCSERWKTMSAKEKGKFEDMAKADKARYEREMKTYIPPKGETKKKFKDPNAPKRPPSAFFLFCSEYRPKIKGEHPGLSIGDVAKKLGEMWNNTAADDKQPYEKKAAKLKEKYEKF

SEQ ID NO: 363 - protein, 1148 aa, Homo sapiens
MDIRKFFGVIPSGKKLVSETVKKNEKTKSDEETLKAKKGIKEIKVNSSRKEDDFKQKQPSKKKRIIYDSDSESEETLQVKNAKKPPEKLPVSSKPGKISRQDPVTYISETDEEDDFMCKKAASKSKENGRSTNSHLGTSNMKKNEENTKTKNKPLSPIKLTPTSVLDYFGTGSVQRSNKKMVASKRKELSQNTDESGLNDEAIAKQLQLDEDAELERQLHEDEEFARTLAMLDEEPKTKKARKDTEAGETFSSVQANLSKAEKHKYPHKVKTAQVSDERKSYSPRKQSKYESSKESQQHSKSSADKIGEVSSPKASSKLAIMKRKEESSYKEIEPVASKRKENAIKLKGETKTPKKTKSSPAKKESVSPEDSEKKRTNYQAYRSYLNREGPKALGSKEIPKGAENCLEGLIFVITGVLESIERDEAKSLIERYGGKVTGNVSKKTNYLVMGRDSGQSKSDKAAALGTKIIDEDGLLNLIRTMPGKKSKYEIAVETEMKKESKLERTPQKNVQGKRKISPSKKESESKKSRPTSKRDSLAKTIKKETDVFWKSLDFKEQVAEETSGDSKARNLADDSSENKVENLLWVDKYKPTSLKTIIGQQGDQSCANKLLRWLRNWQKSSSEDKKHAAKFGKFSGKDDGSSFKAALLSGPPGVGKTTTASLVCQELGYSYVELNASDTRSKSSLKAIVAESLNNTSIKGFYSNGAASSVSTKHALIMDEVDGMAGNEDRGGIQELIGLIKHTKIPIICMCNDRNHPKIRSLVHYCFDLRFQRPRVEQIKGAMMSIAFKEGLKIPPPAMNEIILGANQDIRQVLHNLSMWCARSKALTYDQAKADSHRAKKDIKMGPFDVARKVFAAGEETAHMSLVDKSDLFFHDYSIAPLFVQENYIHVKPVAAGGDMKKHLMLLSRAADSICDGDLVDSQIRSKQNWSLLPAQAIYASVLPGELMRGYMTQFPTFPSWLGKHSSTGKHDRIVQDLALHMSLRTYSSKRTVNMDYLSLLRDALVQPLTSQGVDGVQDVVALMDTYYLMKEDFENIMEISSWGGKPSPFSKLDPKVKAAFTRAYNKEAHLTPYSLQAIKASRHSTSPSLDSEYNEELNEDDSQSDEKDQDAIETDAMIKKKTKSSKPSKPEKDKEPRKGKGKSSKK

SEQ ID NO: 364 - protein, 1147 aa, Homo sapiens
MDIRKFFGVIPSGKKLVSETVKKNEKTKSDEETLKAKKGIKEIKVNSSRKEDDFKQKQPSKKKRIIYDSDSESEETLQVKNAKKPPEKLPVSSKPGKISRQDPVTYISETDEEDDFMCKKAASKSKENGRSTNSHLGTSNMKKNEENTKTKNKPLSPIKLTPTSVLDYFGTGSVQRSNKKMVASKRKELSQNTDESGLNDEAIAKQLQLDEDAELERQLHEDEEFARTLAMLDEEPKTKKARKDTEAGETFSSVQANLSKAEKHKYPHKVKTAQVSDERKSYSPRKQSKYESSKESQQHSKSSADKIGEVSSPKASSKLAIMKRKEESSYKEIEPVASKRKENAIKLKGETKTPKKTKSSPAKKESVSPEDSEKKRTNYQAYRSYLNREGPKALGSKEIPKGAENCLEGLIFVITGVLESIERDEAKSLIERYGGKVTGNVSKKTNYLVMGRDSGQSKSDKAAALGTKIIDEDGLLNLIRTMPGKKSKYEIAVETEMKKESKLERTPQKNVQGKRKISPSKKESESKKSRPTSKRDSLAKTIKKETDVFWKSLDFKEQVAEETSGDSKARNLADDSSENKVENLLWVDKYKPTSLKTIIGQQGDQSCANKLLRWLRNWQKSSSEDKKHAKFGKFSGKDDGSSFKAALLSGPPGVGKTTTASLVCQELGYSYVELNASDTRSKSSLKAIVAESLNNTSIKGFYSNGAASSVSTKHALIMDEVDGMAGNEDRGGIQELIGLIKHTKIPIICMCNDRNHPKIRSLVHYCFDLRFQRPRVEQIKGAMMSIAFKEGLKIPPPAMNEIILGANQDIRQVLHNLSMWCARSKALTYDQAKADSHRAKKDIKMGPFDVARKVFAAGEETAHMSLVDKSDLFFHDYSIAPLFVQENYIHVKPVAAGGDMKKHLMLLSRAADSICDGDLVDSQIRSKQNWSLLPAQAIYASVLPGELMRGYMTQFPTFPSWLGKHSSTGKHDRIVQDLALHMSLRTYSSKRTVNMDYLSLLRDALVQPLTSQGVDGVQDVVALMDTYYLMKEDFENIMEISSWGGKPSPFSKLDPKVKAAFTRAYNKEAHLTPYSLQAIKASRHSTSPSLDSEYNEELNEDDSQSDEKDQDAIETDAMIKKKTKSSKPSKPEKDKEPRKGKGKSSKK

SEQ ID NO: 365 - protein, 1208 aa, Homo sapiens; identical to SEQ ID NO: 178

SEQ ID NO: 366 - protein, 535 aa, Homo sapiens
MTPLVSRLSRLWAIMRKPRAAVGSGHRKQAASQEGRQKHAKNNSQAKPSACDGLARQPEEVVLQASVSSYHLFRDVAEVTAFRGSLLSWYDQEKRDLPWRRRAEDEMDLDRRAYAVWVSEVMLQQTQVATVINYYTGWMQKWPTLQDLASASLEEVNQLWAGLGYYSRGRRLQEGARKVVEELGGHMPRTAETLQQLLPGVGRYTAGAIASIAFGQATGVVDGNVARVLCRVRAIGADPSSTLVSQQLWGLAQQLVDPARPGDFNQAAMELGATVCTPQRPLCSQCPVESLCRARQRVEQEQLLASGSLSGSPDVEECAPNTGQCHLCLPPSEPWDQTLGVVNFPRKASRKPPREESSATCVLEQPGALGAQILLVQRPNSGLLAGLWEFPSVTWEPSEQLQRKALLQELQRWAGPLPATHLRHLGEVVHTFSHIKLTYQVYGLALEGQTPVTTVPPGARWLTQEEFHTAAVSTAMKKVFRVYQGQQPGTCMGSKRSQVSSPCSRKKPRMGQQVLDNFFRSHISTDAHSLNSAAQ

SEQ ID NO: 367 - protein, 522 aa, Homo sapiens
MRKPRAAVGSGHRKQAASQEGRQKHAKNNSQAKPSACDAGLARQPEEVVLQASVSSYHLFRDVAEVTAFRGSLLSWYDQEKRDLPWRRRAEDEMDLDRRAYAVWVSEVMLQQTQVATVINYYTGWMQKWPTLQDLASASLEEVNQLWAGLGYYSRGRRLQEGARKVVEELGGHMPRTAETLQQLLPGVGRYTAGAIASIAFGQATGVVDGNVARVLCRVRAIGADPSSTLVSQQLWGLAQQLVDPARPGDFNQAAMELGATVCTPQRPLCSQCPVESLCRARQRVEQEQLLASGSLSGSPDVEECAPNTGQCHLCLPPSEPWDQTLGVVNFPRKASRKPPREESSATCVLEQPGALGAQILLVQRPNSGLLAGLWEFPSVTWEPSEQLQRKALLQELQRWAGPLPATHLRHLGEVVHTFSHIKLTYQVYGLALEGQTPVTTVPPGARWLTQEEFHTAAVSTAMKKVFRVYQGQQPGTCMGSKRSQVSSPCSRKKPRMGQQVLDNFFRSHISTDAHSLNSAAQ

SEQ ID NO: 368 - protein, 521 aa, Homo sapiens
MRKPRAAVGSGHRKQAASQEGRQKHAKNNSQAKPSACDGLARQPEEVVLQASVSSYHLFRDVAEVTAFRGSLLSWYDQEKRDLPWRRRAEDEMDLDRRAYAVWVSEVMLQQTQVATVINYYTGWMQKWPTLQDLASASLEEVNQLWAGLGYYSRGRRLQEGARKVVEELGGHMPRTAETLQQLLPGVGRYTAGAIASIAFGQATGVVDGNVARVLCRVRAIGADPSSTLVSQQLWGLAQQLVDPARPGDFNQAAMELGATVCTPQRPLCSQCPVESLCRARQRVEQEQLLASGSLSGSPDVEECAPNTGQCHLCLPPSEPWDQTLGVVNFPRKASRKPPREESSATCVLEQPGALGAQILLVQRPNSGLLAGLWEFPSVTWEPSEQLQRKALLQELQRWAGPLPATHLRHLGEVVHTFSHIKLTYQVYGLALEGQTPVTTVPPGARWLTQEEFHTAAVSTAMKKVFRVYQGQQPGTCMGSKRSQVSSPCSRKKPRMGQQVLDNFFRSHISTDAHSLNSAAQ

SEQ ID NO: 369 - protein, 536 aa, Homo sapiens
MTPLVSRLSRLWAIMRKPRAAVGSGHRKQAASQEGRQKHAKNNSQAKPSACDAGLARQPEEVVLQASVSSYHLFRDVAEVTAFRGSLLSWYDQEKRDLPWRRRAEDEMDLDRRAYAVWVSEVMLQQTQVATVINYYTGWMQKWPTLQDLASASLEEVNQLWAGLGYYSRGRRLQEGARKVVEELGGHMPRTAETLQQLLPGVGRYTAGAIASIAFGQATGVVDGNVARVLCRVRAIGADPSSTLVSQQLWGLAQQLVDPARPGDFNQAAMELGATVCTPQRPLCSQCPVESLCRARQRVEQEQLLASGSLSGSPDVEECAPNTGQCHLCLPPSEPWDQTLGVVNFPRKASRKPPREESSATCVLEQPGALGAQILLVQRPNSGLLAGLWEFPSVTWEPSEQLQRKALLQELQRWAGPLPATHLRHLGEVVHTFSHIKLTYQVYGLALEGQTPVTTVPPGARWLTQEEFHTAAVSTAMKKVFRVYQGQQPGTCMGSKRSQVSSPCSRKKPRMGQQVLDNFFRSHISTDAHSLNSAAQ

SEQ ID NO: 370 - protein, 713 aa, Homo sapiens
MATGQDRVVALVDMDCFFVQVEQRQNPHLRNKPCAVVQYKSWKGGGIIAVSYEARAFGVTRSMWADDAKKLCPDLLLAQVRESRGKANLTKYREASVEVMEIMSRFAVIERASIDEAYVDLTSAVQERLQKLQGQPISADLLPSTYIEGLPQGPTTAEETVQKEGMRKQGLFQWLDSLQIDNLTSPDLQLTVGAVIVEEMRAAIERETGFQCSAGISHNKVLAKLACGLNKPNRQTLVSHGSVPQLFSQMPIRKIRSLGGKLGASVIEILGIEYMGELTQFTESQLQSHFGEKNGSWLYAMCRGIEHDPVKPRQLPKTIGCSKNFPGKTALATREQVQWWLLQLAQELEERLTKDRNDNDRVATQLVVSIRVQGDKRLSSLRRCCALTRYDAHKMSHDAFTVIKNCNTSGIQTEWSPPLTMLFLCATKFSASAPSSSTDITSFLSSDPSSLPKVPVTSSEAKTQGSGPAVTATKKATTSLESFFQKAAERQKVKEASLSSLTAPTQAPMSNSPSKPSLPFQTSQSTGTEPFFKQKSLLLKQKQLNNSSVSSPQQNPWSNCKALPNSLPTEYPGCVPVCEGVSKLEESSKATPAEMDLAHNSQSMHASSASKSVLEVTQKATPNPSLLAAEDQVPCEKCGSLVPVWDMPEHMDYHFALELQKSFLQPHSSNPQVVSAVSHQGKRNPKSPLACTNKRPRPEGMQTLESFFKPLTH

SEQ ID NO: 371 - protein, 414 aa, Homo sapiens
MATGQDRVVALVDMDCFFVQVEQRQNPHLRNKPCAVVQYKSWKGGGIIAVSYEARAFGVTRSMWADDAKKLCPDLLLAQVRESRGKANLTKYREASVEVMEIMSRFAVIERASIDEAYVDLTSAVQERLQKLQGQPISADLLPSTYIEGLPQGPTTAEETVQKEGMRKQGLFQWLDSLQIDNLTSPDLQLTVGAVIVEEMRAAIERETGFQCSAGISHNKVLAKLACGLNKPNRQTLVSHGSVPQLFSQMPIRKIRSLGGKLGASVIEILGIEYMGELTQFTESQLQSHFGEKNGSWLYAMCRGIEHDPVKPRQLPKTIGCSKNFPGKTALATREQVQWWLLQLAQELEERLTKDRNDNDRVATQLVVSIRVQGDKRLSSLRRCCALTRYDAHKMSHDAFTVIKNCNTSGIQTE

SEQ ID NO: 372 - protein, 396 aa, Homo sapiens
MLGFLSARQTGLEDPLRLRRAESTRRVLGLELNKDRDVERIHGGGINTLDIEPVEGRYMLSGGSDGVIVLYDLENSSRQSYYTCKAVCSIGRDHPDVHRYSVETVQWYPHDTGMFTSSSFDKTLKVWDTNTLQTADVFNFEETVYSHHMSPVSTKHCLVAVGTRGPKVQLCDLKSGSCSHILQGHRQEILAVSWSPRYDYILATASADSRVKLWDVRRASGCLITLDQHNGKKSQAVESANTAHNGKVNGLCFTSDGLHLLTVGTDNRMRLWNSSNGENTLVNYGKVCNNSKKGLKFTVSCGCSSEFVFVPYGSTIAVYTVYSGEQITMLKGHYKTVDCCVFQSNFQELYSGSRDCNILAWVPSLYEPVPDDDETTTKSQLNPAFEDAWSSSDEEG

SEQ ID NO: 373 - protein, 205 aa, Homo sapiens
MLGFLSARQTGLEDPLRLRRAESTRRVLGLELNKDRDVERIHGGGINTLDIEPVEGRYMLSGGSDGVIVLYDLENSSRQSYYTCKAVCSIGRDHPDVHRYSVETVQWYPHDTGMFTSSSFDKTLKVWDTNTLQTADVFNFEETVYSHHMSPVSTKHCLVAVGTRGPKVQLCDLKSGSCSHILQGIFILFQTATTLSKRFNKKKRY

SEQ ID NO: 374 - protein, 1493 aa, Homo sapiens
MPNEGIPHSSQTQEQDCLQSQPVSNNEEMAIKQESGGDGEVEEYLSFRSVGDGLSTSAVGCASAAPRRGPALLHIDRHQIQAVEPSAQALELQGLGVDVYDQDVLEQGVLQQVDNAIHEASRASQLVDVEKEYRSVLDDLTSCTTSLRQINKIIEQLSPQAATSRDINRKLDSVKRQKYNKEQQLKKITAKQKHLQAILGGAEVKIELDHASLEEDAEPGPSSLGSMLMPVQETAWEELIRTGQMTPFGTQIPQKQEKKPRKIMLNEASGFEKYLADQAKLSFERKKQGCNKRAARKAPAPVTPPAPVQNKNKPNKKARVLSKKEERLKKHIKKLQKRALQFQGKVGLPKARRPWESDMRPEAEGDSEGEESEYFPTEEEEEEEDDEVEGAEADLSGDGTDYELKPLPKGGKRQKKVPVQEIDDDFFPSSGEEAEAASVGEGGGGGRKVGRYRDDGDEDYYKQRLRRWNKLRLQDKEKRLKLEDDSEESDAEFDEGFKVPGFLFKKLFKYQQTGVRWLWELHCQQAGGILGDEMGLGKTIQIIAFLAGLSYSKIRTRGSNYRFEGLGPTVIVCPTTVMHQWVKEFHTWWPPFRVAILHETGSYTHKKEKLIRDVAHCHGILITSYSYIRLMQDDISRYDWHYVILDEGHKIRNPNAAVTLACKQFRTPHRIILSGSPMQNNLRELWSLFDFIFPGKLGTLPVFMEQFSVPITMGGYSNASPVQVKTAYKCACVLRDTINPYLLRRMKSDVKMSLSLPDKNEQVLFCRLTDEQHKVYQNFVDSKEVYRILNGEMQIFSGLIALRKICNHPDLFSGGPKNLKGLPDDELEEDQFGYWKRSGKMIVVESLLKIWHKQGQRVLLFSQSRQMLDILEVFLRAQKYTYLKMDGTTTIASRQPLITRYNEDTSIFVFLLTTRVGGLGVNLTGANRVVIYDPDWNPSTDTQARERAWRIGQKKQVTVYRLLTAGTIEEKIYHRQIFKQFLTNRVLKDPKQRRFFKSNDLYELFTLTSPDASQSTETSAIFAGTGSDVQTPKCHLKRRIQPAFGADHDVPKRKKFPASNISVNDATSSEEKSEAKGAEVNAVTSNRSDPLKDDPHMSSNVTSNDRLGEETNAVSGPEELSVISGNGECSNSSGTGKTSMPSGDESIDEKLGLSYKRERPSQAQTEAFWENKQMENNFYKHKSKTKHHSVAEEETLEKHLRPKQKPKNSKHCRDAKFEGTRIPHLVKKRRYQKQDSENKSEAKEQSNDDYVLEKLFKKSVGVHSVMKHDAIMDGASPDYVLVEAEANRVAQDALKALRLSRQRCLGAVSGVPTWTGHRGISGAPAGKKSRFGKKRNSNFSVQHPSSTSPTEKCQDGIMKKEGKDNVPEHFSGRAEDADSSSGPLASSSLLAKMRARNHLILPERLESESGHLQEASALLPTTEHDDLLVEMRNFIAFQAHTDGQASTREILQEFESKLSASQSCVFRELLRNLCTFHRTSGGEGIWKLKPEYC

SEQ ID NO: 375 - protein, 273 aa, Homo sapiens
MAAADGALPEAAALEQPAELPASVRASIERKRQRALMLRQARLAARPYSATAAAATGGMANVKAAPKIIDTGGGFILEEEEEEEQKIGKVVHQPGPVMEFDYVICEECGKEFMDSYLMNHFDLPTCDNCRDADDKHKLITKTEAKQEYLLKDCDLEKREPPLKFIVKKNPHHSQWGDMKLYLKLQIVKRSLEVWGSQEALEEAKEVRQENREKMKQKKFDKKVKELRRAVRSSVWKRETIVHQHEYGPEENLEDDMYRKTCTMCGHELTYEKM

SEQ ID NO: 376 - protein, 782 aa, Homo sapiens
MGKRDRADRDKKKSRKRHYEDEEDDEEDAPGNDPQEAVPSAAGKQVDESGTKVDEYGAKDYRLQMPLKDDHTSRPLWVAPDGHIFLEAFSPVYKYAQDFLVAIAEPVCRPTHVHEYKLTAYSLYAAVSVGLQTSDITEYLRKLSKTGVPDGIMQFIKLCTVSYGKVKLVLKHNRYFVESCHPDVIQHLLQDPVIRECRLRNSEGEATELITETFTSKSAISKTAESSGGPSTSRVTDPQGKSDIPMDLFDFYEQMDKDEEEEEETQTVSFEVKQEMIEELQKRCIHLEYPLLAEYDFRNDSVNPDINIDLKPTAVLRPYQEKSLRKMFGNGRARSGVIVLPCGAGKSLVGVTAACTVRKRCLVLGNSAVSVEQWKAQFKMWSTIDDSQICRFTSDAKDKPIGCSVAISTYSMLGHTTKRSWEAERVMEWLKTQEWGLMILDEVHTIPAKMFRRVLTIVQAHCKLGLTATLVREDDKIVDLNFLIGPKLYEANWMELQNNGYIAKVQCAEVWCPMSPEFYREYVAIKTKKRILLYTMNPNKFRACQFLIKFHERRNDKIIVFADNVFALKEYAIRLNKPYIYGPTSQGERMQILQNFKHNPKINTIFISKVGDTSFDLPEANVLIQISSHGGSRRQEAQRLGRVLRAKKGMVAEEYNAFFYSLVSQDTQEMAYSTKRQRFLVDQGYSFKVITKLAGMEEEDLAFSTKEEQQQLLQKVLAATDLDAEEEVVAGEFGSRSSQASRRFGTMSSMSGADDTVYMEYHSSRSKAPSKHVHPLFKRFRK

SEQ ID NO: 377 - protein, 940 aa, Homo sapiens
MARKRAAGGEPRGRELRSQKSKAKSKARREEEEEDAFEDEKPPKKSLLSKVSQGKRKRGCSHPGGSADGPAKKKVAKVTVKSENLKVIKDEALSDGDDLRDFPSDLKKAHHLKRGATMNEDSNEEEEESENDWEEVEELSEPVLGDVRESTAFSRSLLPVKPVEIEIETPEQAKTRERSEKIKLEFETYLRRAMKRFNKGVHEDTHKVHLLCLLANGFYRNNICSQPDLHAIGLSIIPARFTRVLPRDVDTYYLSNLVKWFIGTFTVNAELSASEQDNLQTTLERRFAIYSARDDEELVHIFLLILRALQLLTRLVLSLQPIPLKSATAKGKKPSKERLTADPGGSSETSSQVLENHTKPKTSKGTKQEETFAKGTCRPSAKGKRNKGGRKKRSKPSSSEEDEGPGDKQEKATQRRPHGRERRVASRVSYKEESGSDEAGSGSDFELSSGEASDPSDEDSEPGPPKQRKAPAPQRTKAGSKSASRTHRGSHRKDPSLPAASSSSSSSKRGKKMCSDGEKAEKRSIAGIDQWLEVFCEQEEKWVCVDCVHGVVGQPLTCYKYATKPMTYVVGIDSDGWVRDVTQRYDPVWMTVTRKCRVDAEWWAETLRPYQSPFMDREKKEDLEFQAKHMDQPLPTAIGLYKNHPLYALKRHLLKYEAIYPETAAILGYCRGEAVYSRDCVHTLHSRDTWLKKARVVRLGEVPYKMVKGFSNRARKARLAEPQLREENDLGLFGYWQTEEYQPPVAVDGKVPRNEFGNVYLFLPSMMPIGCVQLNLPNLHRVARKLDIDCVQAITGFDFHGGYSHPVTDGYIVCEEFKDVLLTAWENEQAVIERKEKEKKEKRALGNWKLLAKGLLIRERLKRRYGPKSEAAAPHTDAGGGLSSDEEEGTSSQAEAARILAASWPQNREDEEKQKLKGGPKKTKREKKAAASHLFPFEQL

SEQ ID NO: 378 - protein, 903 aa, Homo sapiens
MARKRAAGGEPRGRELRSQKSKAKSKARREEEEEDAFEDEKPPKKSLLSKVSQGKRKRGCSHPGGSADGPAKKKVAKVTVKSENLKVIKDEALSDGDDLRDFPSDLKKAHHLKRGATMNEDSNEEEEESENDWEEAKTRERSEKIKLEFETYLRRAMKRFNKGVHEDTHKVHLLCLLANGFYRNNICSQPDLHAIGLSIIPARFTRVLPRDVDTYYLSNLVKWFIGTFTVNAELSASEQDNLQTTLERRFAIYSARDDEELVHIFLLILRALQLLTRLVLSLQPIPLKSATAKGKKPSKERLTADPGGSSETSSQVLENHTKPKTSKGTKQEETFAKGTCRPSAKGKRNKGGRKKRSKPSSSEEDEGPGDKQEKATQRRPHGRERRVASRVSYKEESGSDEAGSGSDFELSSGEASDPSDEDSEPGPPKQRKAPAPQRTKAGSKSASRTHRGSHRKDPSLPAASSSSSSSKRGKKMCSDGEKAEKRSIAGIDQWLEVFCEQEEKWVCVDCVHGVVGQPLTCYKYATKPMTYVVGIDSDGWVRDVTQRYDPVWMTVTRKCRVDAEWWAETLRPYQSPFMDREKKEDLEFQAKHMDQPLPTAIGLYKNHPLYALKRHLLKYEAIYPETAAILGYCRGEAVYSRDCVHTLHSRDTWLKKARVVRLGEVPYKMVKGFSNRARKARLAEPQLREENDLGLFGYWQTEEYQPPVAVDGKVPRNEFGNVYLFLPSMMPIGCVQLNLPNLHRVARKLDIDCVQAITGFDFHGGYSHPVTDGYIVCEEFKDVLLTAWENEQAVIERKEKEKKEKRALGNWKLLAKGLLIRERLKRRYGPKSEAAAPHTDAGGGLSSDEEEGTSSQAEAARILAASWPQNREDEEKQKLKGGPKKTKREKKAAASHLFPFEQL

SEQ ID NO: 379 - protein, 140 aa, Homo sapiens
MARKRAAGGEPRGRELRSQKSKAKSKARREEEEEDAFEDEKPPKKSLLSKVSQGKRKRGCSHPGGSADGPAKKKVAKVTVKSENLKVIKDEALSDGDDLRDFPSDLKKAHHLKRGATMNEDSNEEEEESENDWEEVEVKR

SEQ ID NO: 380 - protein, 760 aa, Homo sapiens
MKLNVDGLLVYFPYDYIYPEQFSYMRELKRTLDAKGHGVLEMPSGTGKTVSLLALIMAYQRAYPLEVTKLIYCSRTVPEIEKVIEELRKLLNFYEKQEGEKLPFLGLALSSRKNLCIHPEVTPLRFGKDVDGKCHSLTASYVRAQYQHDTSLPHCRFYEEFDAHGREVPLPAGIYNLDDLKALGRRQGWCPYFLARYSILHANVVVYSYHYLLDPKIADLVSKELARKAVVVFDEAHNIDNVCIDSMSVNLTRRTLDRCQGNLETLQKTVLRIKETDEQRLRDEYRRLVEGLREASAARETDAHLANPVLPDEVLQEAVPGSIRTAEHFLGFLRRLLEYVKWRLRVQHVVQESPPAFLSGLAQRVCIQRKPLRFCAERLRSLLHTLEITDLADFSPLTLLANFATLVSTYAKGFTIIIEPFDDRTPTIANPILHFSCMDASLAIKPVFERFQSVIITSGTLSPLDIYPKILDFHPVTMATFTMTLARVCLCPMIIGRGNDQVAISSKFETREDIAVIRNYGNLLLEMSAVVPDGIVAFFTSYQYMESTVASWYEQGILENIQRNKLLFIETQDGAETSVALEKYQEACENGRGAILLSVARGKVSEGIDFVHHYGRAVIMFGVPYVYTQSRILKARLEYLRDQFQIRENDFLTFDAMRHAAQCVGRAIRGKTDYGLMVFADKRFARGDKRGKLPRWIQEHLTDANLNLTVDEGVQVAKYFLRQMAQPFHREDQLGLSLLSLEQLESEETLKRIEQIAQQL

SEQ ID NO: 381 - protein, 405 aa, Homo sapiens
MRELKRTLDAKGHGVLEMPSGTGKTVSLLALIMAYQRAYPLEVTKLIYCSRTVPEIEKVIEELRKLLNFYEKQEGEKLPFLGLALSSRKNLCIHPEVTPLRFGKDVDGKCHSLTASYVRAQYQHDTSLPHCRFYEEFDAHGREVPLPAGIYNLDDLKALGRRQGWCPYFLARYSILHANVVVYSYHYLLDPKIADLVSKELARKAVVVFDEAHNIDNVCIDSMSVNLTRRTLDRCQGNLETLQKTVLRIKETDEQRLRDEYRRLVEGLREASAARETDAHLANPVLPDEVLQEAVPGSIRTAEHFLGFLRRLLEYVKWRLRVQHVVQESPPAFLSGLAQRVCIQRKPLRFCAERLRSLLHTLEITDLADFSPLTLLANFATLVSTYAKGQAQHCGSSRNQKRSHP

SEQ ID NO: 382 - protein, 1186 aa, Homo sapiens
MGVQGLWKLLECSGRQVSPEALEGKILAVDISIWLNQALKGVRDRHGNSIENPHLLTLFHRLCKLLFFRIRPIFVFDGDAPLLKKQTLVKRRQRKDLASSDSRKTTEKLLKTFLKRQAIKTAFRSKRDEALPSLTQVRRENDLYVLPPLQEEEKHSSEEEDEKEWQERMNQKQALQEEFFHNPQAIDIESEDFSSLPPEVKHEILTDMKEFTKRRRTLFEAMPEESDDFSQYQLKGLLKKNYLNQHIEHVQKEMNQQHSGHIRRQYEDEGGFLKEVESRRVVSEDTSHYILIKGIQAKTVAEVDSESLPSSSKMHGMSFDVKSSPCEKLKTEKEPDATPPSPRTLLAMQAALLGSSSEEELESENRRQARGRNAPAAVDEGSISPRTLSAIKRALDDDEDVKVCAGDDVQTGGPGAEEMRINSSTENSDEGLKVRDGKGIPFTATLASSSVNSAEEHVASTNEGREPTDSVPKEQMSLVHVGTEAFPISDESMIKDRKDRLPLESAVVRHSDAPGLPNGRELTPASPTCTNSVSKNETHAEVLEQQNELCPYESKFDSSLLSSDDETKCKPNSASEVIGPVSLQETSSIVSVPSEAVDNVENVVSFNAKEHENFLETIQEQQTTESAGQDLISIPKAVEPMEIDSEESESDGSFIEVQSVISDEELQAEFPETSKPPSEQGEEELVGTREGEAPAESESLLRDNSERDDVDGEPQEAEKDAEDSLHEWQDINLEELETLESNLLAQQNSLKAQKQQQERIAATVTGQMFLESQELLRLFGIPYIQAPMEAEAQCAILDLTDQTSGTITDDSDIWLFGARHVYRNFFNKNKFVEYYQYVDFHNQLGLDRNKLINLAYLLGSDYTEGIPTVGCVTAMEILNEFPGHGLEPLLKFSEWWHEAQKNPKIRPNPHDTKVKKKLRTLQLTPGFPNPAVAEAYLKPVVDDSKGSFLWGKPDLDKIREFCQRYFGWNRTKTDESLFPVLKQLDAQQTQLRIDSFFRLAQQEKEDAKRIKSQRLNRAVTCMLRKEKEAAASEIEAVSVAMEKEFELLDKAKGKTQKRGITNTLEESSSLKRKRLSDSKGKNTCGGFLGETCLSESSDGSSSEDAESSSLMNVQRRTAAKEPKTSASDSQNSVKEAPVKNGGATTSSSSDSDDDGGKEKMVLVTARSVFGKKRRKLRRARGRKRKT

SEQ ID NO: 383 - protein, 71 aa, Homo sapiens
MVNVLKGVLIECDPAMKQFLLYLDESNALGKKFIIQDIDDTHVFVIAELVNVLQERVGELMDQNAFSLTQK

SEQ ID NO: 384 - protein, 709 aa, Homo sapiens
MDQKLSKLVEELTTSGEPRLNPEKMKELKKICKSSEEQLSRAYRLLIAQLTQEHAEIRLSAFQIVEELFVRSHQFRMLVVSNFQEFLELTLGTDPAQPLPPPREAAQRLRQATTRAVEGWNEKFGEAYKKLALGYHFLRHNKKVDFQDTNARSLAERKREEEKQKHLDKIYQERASQAEREMQEMSGEIESCLTEVESCFRLLVPFDFDPNPETESLGMASGMSDALRSSCAGQVGPCRSGTPDPRDGEQPCCSRDLPASAGHPRAGGGAQPSQTATGDPSDEDEDSDLEEFVRSHGLGSHKYTLDVELCSEGLKVQENEDNLALIHAARDTLKLIRNKFLPAVCSWIQRFTRVGTHGGCLKRAIDLKAELELVLRKYKELDIEPEGGERRRTEALGDAEEDEDDEDFVEVPEKEGYEPHIPDHLRPEYGLEAAPEKDTVVRCLRTRTRMDEEVSDPTSAAAQLRQLRDHLPPPSSASPSRALPEPQEAQKLAAERARAPVVPYGVDLHYWGQELPTAGKIVKSDSQHRFWKPSEVEEEVVNADISEMLRSRHITFAGKFEPVQHWCRAPRPDGRLCERQDRLKCPFHGKIVPRDDEGRPLDPEDRAREQRRQLQKQERPEWQDPELMRDVEAATGQDLGSSRYSGKGRGKKRRYPSLTNLKAQADTARARIGRKVFAKAAVRRVVAAMNRMDQKKHEKFSNQFNYALN

SEQ ID NO: 385 - protein, 260 aa, Homo sapiens
MDEEVSDPTSAAAQLRQLRDHLPPPSSASPSRALPEPQEAQKLAAERARAPVVPYGVDLHYWGQELPTAGKIVKSDSQHRFWKPSEVEEEVVNADISEMLRSRHITFAGKFEPVQHWCRAPRPDGRLCERQDRLKCPFHGKIVPRDDEGRPLDPEDRAREQRRQLQKQERPEWQDPELMRDVEAATGQDLGSSRYSGKGRGKKRRYPSLTNLKAQADTARARIGRKVFAKAAVRRVVAAMNRMDQKKHEKFSNQFNYALN

SEQ ID NO: 386 - protein, 1102 aa, Homo sapiens
MNHQQQQQQQKAGEQQLSEPEDMEMEAGDTDDPPRITQNPVINGNVALSDGHNTAEEDMEDDTSWRSEATFQFTVERFSRLSESVLSPPCFVRNLPWKIMVMPRFYPDRPHQKSVGFFLQCNAESDSTSWSCHAQAVLKIINYRDDEKSFSRRISHLFFHKENDWGFSNFMAWSEVTDPEKGFIDDDKVTFEVFVQADAPHGVAWDSKKHTGYVGLKNQGATCYMNSLLQTLFFTNQLRKAVYMMPTEGDDSSKSVPLALQRVFYELQHSDKPVGTKKLTKSFGWETLDSFMQHDVQELCRVLLDNVENKMKGTCVEGTIPKLFRGKMVSYIQCKEVDYRSDRREDYYDIQLSIKGKKNIFESFVDYVAVEQLDGDNKYDAGEHGLQEAEKGVKFLTLPPVLHLQLMRFMYDPQTDQNIKINDRFEFPEQLPLDEFLQKTDPKDPANYILHAVLVHSGDNHGGHYVVYLNPKGDGKWCKFDDDVVSRCTKEEAIEHNYGGHDDDLSVRHCTNAYMLVYIRESKLSEVLQAVTDHDIPQQLVERLQEEKRIEAQKRKERQEAHLYMQVQIVAEDQFCGHQGNDMYDEEKVKYTVFKVLKNSSLAEFVQSLSQTMGFPQDQIRLWPMQARSNGTKRPAMLDNEADGNKTMIELSDNENPWTIFLETVDPELAASGATLPKFDKDHDVMLFLKMYDPKTRSLNYCGHIYTPISCKIRDLLPVMCDRAGFIQDTSLILYEEVKPNLTERIQDYDVSLDKALDELMDGDIIVFQKDDPENDNSELPTAKEYFRDLYHRVDVIFCDKTIPNDPGFVVTLSNRMNYFQVAKTVAQRLNTDPMLLQFFKSQGYRDGPGNPLRHNYEGTLRDLLQFFKPRQPKKLYYQQLKMKITDFENRRSFKCIWLNSQFREEEITLYPDKHGCVRDLLEECKKAVELGEKASGKLRLLEIVSYKIIGVHQEDELLECLSPATSRTFRIEEIPLDQVDIDKENEMLVTVAHFHKEVFGTFGIPFLLRIHQGEHFREVMKRIQSLLDIQEKEFEKFKFAIVMMGRHQYINEDEYEVNLKDFEPQPGNMSHPRPWLGLDHFNKAPKRSRYTYLEKAIKIHN

SEQ ID NO: 387 - RNA, 20 nt, synthetic construct
  misc_feature 1..20: note = Synthetic
  source 1..20: mol_type = other RNA
gacctagggatcgatctgga

SEQ ID NO: 388 - RNA, 20 nt, synthetic construct
  misc_feature 1..20: note = Synthetic
  source 1..20: mol_type = other RNA
gacctctagctcgagcgcga

SEQ ID NO: 389 - RNA, 20 nt, synthetic construct
  misc_feature 1..20: note = Synthetic
  source 1..20: mol_type = other RNA
gacgggaaagggggagttcg

SEQ ID NO: 390 - RNA, 20 nt, synthetic construct
  misc_feature 1..20: note = Synthetic
  source 1..20: mol_type = other RNA
gagcgcgagggacctcccgc

SEQ ID NO: 391 - RNA, 20 nt, synthetic construct
  misc_feature 1..20: note = Synthetic
  source 1..20: mol_type = other RNA
gagttcgcggccggtggcgg

SEQ ID NO: 392 - RNA, 20 nt, synthetic construct
  misc_feature 1..20: note = Synthetic
  source 1..20: mol_type = other RNA
gatcgatctggagggacttg

SEQ ID NO: 393 - RNA, 20 nt, synthetic construct
  misc_feature 1..20: note = Synthetic
  source 1..20: mol_type = other RNA
gctgtcgccaccgccgccac

SEQ ID NO: 394 - RNA, 20 nt, synthetic construct
  misc_feature 1..20: note = Synthetic
  source 1..20: mol_type = other RNA
ggaaagggggagttcgcggc

SEQ ID NO: 395 - RNA, 20 nt, synthetic construct
  misc_feature 1..20: note = Synthetic
  source 1..20: mol_type = other RNA
ggacctcccgccgggatgcc

SEQ ID NO: 396 - RNA, 20 nt, synthetic construct
  misc_feature 1..20: note = Synthetic
  source 1..20: mol_type = other RNA
ggatcgatctggagggactt

SEQ ID NO: 397 - RNA, 20 nt, synthetic construct
  misc_feature 1..20: note = Synthetic
  source 1..20: mol_type = other RNA
gggatcgatctggagggact

SEQ ID NO: 398 - RNA, 20 nt, synthetic construct
  misc_feature 1..20: note = Synthetic
  source 1..20: mol_type = other RNA
gggatttcttgagtggcggg

SEQ ID NO: 399 - RNA, 20 nt, synthetic construct
  misc_feature 1..20: note = Synthetic
  source 1..20: mol_type = other RNA
ggggagttcgcggccggtgg

SEQ ID NO: 400 - RNA, 20 nt, synthetic construct
  misc_feature 1..20: note = Synthetic
  source 1..20: mol_type = other RNA
ggtactgtttggagagaaat

SEQ ID NO: 401 - RNA, 20 nt, synthetic construct
  misc_feature 1..20: note = Synthetic
  source 1..20: mol_type = other RNA
ggtggcgacagcggcgacct

SEQ ID NO: 402 - RNA, 20 nt, synthetic construct
  misc_feature 1..20: note = Synthetic
  source 1..20: mol_type = other RNA
gtaccaggcatcccggcggg

SEQ ID NO: 403 - RNA, 20 nt, synthetic construct
  misc_feature 1..20: note = Synthetic
  source 1..20: mol_type = other RNA
gtccctccagatcgatccct

SEQ ID NO: 404 - RNA, 20 nt, synthetic construct
  misc_feature 1..20: note = Synthetic
  source 1..20: mol_type = other RNA
gtccctcgcgctcgagctag

SEQ ID NO: 405 - RNA, 20 nt, synthetic construct
  misc_feature 1..20: note = Synthetic
  source 1..20: mol_type = other RNA
gtggcgacagcggcgaccta

SEQ ID NO: 406 - RNA, 20 nt, synthetic construct
  misc_feature 1..20: note = Synthetic
  source 1..20: mol_type = other RNA
gtgtgacgtgacgggaaagg

SEQ ID NO: 407 - RNA, 20 nt, synthetic construct
  misc_feature 1..20: note = Synthetic
  source 1..20: mol_type = other RNA
aacagtaccaggcatcccgg

SEQ ID NO: 408 - RNA, 20 nt, synthetic construct
  misc_feature 1..20: note = Synthetic
  source 1..20: mol_type = other RNA
aagggggagttcgcggccgg

SEQ ID NO: 409 - RNA, 20 nt, synthetic construct
  misc_feature 1..20: note = Synthetic
  source 1..20: mol_type = other RNA
acagtaccaggcatcccggc

SEQ ID NO: 410 - RNA, 20 nt, synthetic construct
  misc_feature 1..20: note = Synthetic
  source 1..20: mol_type = other RNA
agacctctagctcgagcgcg

SEQ ID NO: 411 - RNA, 20 nt, synthetic construct
  misc_feature 1..20: note = Synthetic
  source 1..20: mol_type = other RNA
agcgcgagggacctcccgcc

SEQ ID NO: 412 - RNA, 20 nt, synthetic construct
  misc_feature 1..20: note = Synthetic
  source 1..20: mol_type = other RNA
attgtgtgacgtgacgggaa

SEQ ID NO: 413 - RNA, 20 nt, synthetic construct
  misc_feature 1..20: note = Synthetic
  source 1..20: mol_type = other RNA
atttcttgagtggcgggcgg

SEQ ID NO: 414 - RNA, 20 nt, synthetic construct
  misc_feature 1..20: note = Synthetic
  source 1..20: mol_type = other RNA
caagaaatcccgtggatgat

SEQ ID NO: 415 - RNA, 20 nt, synthetic construct
  misc_feature 1..20: note = Synthetic
  source 1..20: mol_type = other RNA
catccacgggatttcttgag

SEQ ID NO: 416 - RNA, 20 nt, synthetic construct
  misc_feature 1..20: note = Synthetic
  source 1..20: mol_type = other RNA
cccgtcacgtcacacaatat

SEQ ID NO: 417 - RNA, 20 nt, synthetic construct
  misc_feature 1..20: note = Synthetic
  source 1..20: mol_type = other RNA
ccgatattgtgtgacgtgac

SEQ ID NO: 418 - RNA, 20 nt, synthetic construct
  misc_feature 1..20: note = Synthetic
  source 1..20: mol_type = other RNA
ccgcagctacctatcatcca

SEQ ID NO: 419 - RNA, 20 nt, synthetic construct
  misc_feature 1..20: note = Synthetic
  source 1..20: mol_type = other RNA
ccgccactcaagaaatcccg

SEQ ID NO: 420 - RNA, 20 nt, synthetic construct
  misc_feature 1..20: note = Synthetic
  source 1..20: mol_type = other RNA
ccgggatgcctggtactgtt

SEQ ID NO: 421 - RNA, 20 nt, synthetic construct
  misc_feature 1..20: note = Synthetic
  source 1..20: mol_type = other RNA
ccgtggatgataggtagctg

SEQ ID NO: 422 - RNA, 20 nt, synthetic construct
  misc_feature 1..20: note = Synthetic
  source 1..20: mol_type = other RNA
cgacctagggatcgatctgg

SEQ ID NO: 423 - RNA, 20 nt, synthetic construct
  misc_feature 1..20: note = Synthetic
  source 1..20: mol_type = other RNA
cgcagctacctatcatccac

SEQ ID NO: 424 - RNA, 20 nt, synthetic construct
  misc_feature 1..20: note = Synthetic
  source 1..20: mol_type = other RNA
cggcgacctagggatcgatc

SEQ ID NO: 425 - RNA, 20 nt, synthetic construct
  misc_feature 1..20: note = Synthetic
  source 1..20: mol_type = other RNA
tccgatattgtgtgacgtga

SEQ ID NO: 426 - RNA, 20 nt, synthetic construct
  misc_feature 1..20: note = Synthetic
  source 1..20: mol_type = other RNA
tggcgggcggcggcagcgaa

SEQ ID NO: 427 - RNA, 22 nt, synthetic construct
  misc_feature 1..22: note = Synthetic
  source 1..22: mol_type = other RNA
gagtgcagtgggctctgaaggc

SEQ ID NO: 428 - RNA, 22 nt, synthetic construct
  misc_feature 1..22: note = Synthetic
  source 1..22: mol_type = other RNA
gcggtggcgacagcggcgacct

SEQ ID NO: 429 - RNA, 22 nt, synthetic construct
  misc_feature 1..22: note = Synthetic
  source 1..22: mol_type = other RNA
cgcccgccactcaagaaatccc

SEQ ID NO: 430 - RNA, 22 nt, synthetic construct
  misc_feature 1..22: note = Synthetic
  source 1..22: mol_type = other RNA
cgtggatgataggtagctgcgg

SEQ ID NO: 431 - RNA, 22 nt, synthetic construct
  misc_feature 1..22: note = Synthetic
  source 1..22: mol_type = other RNA
ctggtactgtttggagagaaat

SEQ ID NO: 432 - RNA, 22 nt, synthetic construct
  misc_feature 1..22: note = Synthetic
  source 1..22: mol_type = other RNA
tacctatcatccacgggatttc

SEQ ID NO: 433 - RNA, 22 nt, synthetic construct
  misc_feature 1..22: note = Synthetic
  source 1..22: mol_type = other RNA
tcgagcgcgagggacctcccgc

SEQ ID NO: 434 - RNA, 22 nt, synthetic construct
  misc_feature 1..22: note = Synthetic
  source 1..22: mol_type = other RNA
tcttgagtggcgggcggcggca

SEQ ID NO: 435 - RNA, 22 nt, synthetic construct
  misc_feature 1..22: note = Synthetic
  source 1..22: mol_type = other RNA
tgccgcagctacctatcatcca

SEQ ID NO: 436 - RNA, 22 nt, synthetic construct
  misc_feature 1..22: note = Synthetic
  source 1..22: mol_type = other RNA
ttgtgtgacgtgacgggaaagg

SEQ ID NO: 437 - RNA, 22 nt, synthetic construct
  misc_feature 1..22: note = Synthetic
  source 1..22: mol_type = other RNA
tttcccgtcacgtcacacaata

SEQ ID NO: 438 - RNA, 20 nt, synthetic construct
  misc_feature 1..20: note = Synthetic
  source 1..20: mol_type = other RNA
gaacgaggcatctcgccgcg

SEQ ID NO: 439 - RNA, 20 nt, synthetic construct
  misc_feature 1..20: note = Synthetic
  source 1..20: mol_type = other RNA
gagctcgactttcccagctc

SEQ ID NO: 440 - RNA, 20 nt, synthetic construct
  misc_feature 1..20: note = Synthetic
  source 1..20: mol_type = other RNA
gataaatatcggggtgacag

SEQ ID NO: 441 - RNA, 20 nt, synthetic construct
  misc_feature 1..20: note = Synthetic
  source 1..20: mol_type = other RNA
gcccaggagtgcgcgggagt

SEQ ID NO: 442 - RNA, 20 nt, synthetic construct
  misc_feature 1..20: note = Synthetic
  source 1..20: mol_type = other RNA
gccgccatcttggtctagga

SEQ ID NO: 443 - RNA, 20 nt, synthetic construct
  misc_feature 1..20: note = Synthetic
  source 1..20: mol_type = other RNA
gcgcgggagtaggttaggcc

SEQ ID NO: 444 - RNA, 20 nt, synthetic construct
  misc_feature 1..20: note = Synthetic
  source 1..20: mol_type = other RNA
ggaggagatcggcggagggc

SEQ ID NO: 445 - RNA, 20 nt, synthetic construct
  misc_feature 1..20: note = Synthetic
  source 1..20: mol_type = other RNA
ggagtgcgcgggagtaggtt

SEQ ID NO: 446 - RNA, 20 nt, synthetic construct
  misc_feature 1..20: note = Synthetic
  source 1..20: mol_type = other RNA
ggcagactgagggttccccg

SEQ ID NO: 447 - RNA, 20 nt, synthetic construct
  misc_feature 1..20: note = Synthetic
  source 1..20: mol_type = other RNA
ggcatctcgccgcgaggggg

SEQ ID NO: 448 - RNA, 20 nt, synthetic construct
  misc_feature 1..20: note = Synthetic
  source 1..20: mol_type = other RNA
ggcccgcccagccgccatct

SEQ ID NO: 449 - RNA, 20 nt, synthetic construct
  misc_feature 1..20: note = Synthetic
  source 1..20: mol_type = other RNA
ggcgagatgcctcgttcccc

SEQ ID NO: 450 - RNA, 20 nt, synthetic construct
  misc_feature 1..20: note = Synthetic
  source 1..20: mol_type = other RNA
gggaggagatcggcggaggg

SEQ ID NO: 451 - RNA, 20 nt, synthetic construct
  misc_feature 1..20: note = Synthetic
  source 1..20: mol_type = other RNA
gggagtaggttaggcctggc

SEQ ID NO: 452 - RNA, 20 nt, synthetic construct
  misc_feature 1..20: note = Synthetic
  source 1..20: mol_type = other RNA
gggcagctttcaacagaggg

SEQ ID NO: 453 - RNA, 20 nt, synthetic construct
  misc_feature 1..20: note = Synthetic
  source 1..20: mol_type = other RNA
ggggtgacagtggtaggccg

SEQ ID NO: 454 - RNA, 20 nt, synthetic construct
  misc_feature 1..20: note = Synthetic
  source 1..20: mol_type = other RNA
gggtgacagtggtaggccgc

SEQ ID NO: 455 - RNA, 20 nt, synthetic construct
  misc_feature 1..20: note = Synthetic
  source 1..20: mol_type = other RNA
ggtgacagtggtaggccgcg

SEQ ID NO: 456 - RNA, 20 nt, synthetic construct
  misc_feature 1..20: note = Synthetic
  source 1..20: mol_type = other RNA
gtcgagctctggcagcgtct

SEQ ID NO: 457 - RNA, 20 nt, synthetic construct
  misc_feature 1..20: note = Synthetic
  source 1..20: mol_type = other RNA
gtgagtaaacagccggagct

SEQ ID NO: 458 - RNA, 20 nt, synthetic construct
  misc_feature 1..20: note = Synthetic
  source 1..20: mol_type = other RNA
aacctactcccgcgcactcc

SEQ ID NO: 459 - RNA, 20 nt, synthetic construct
  misc_feature 1..20: note = Synthetic
  source 1..20: mol_type = other RNA
aacgaggcatctcgccgcga

SEQ ID NO: 460 - RNA, 20 nt, synthetic construct
  misc_feature 1..20: note = Synthetic
  source 1..20: mol_type = other RNA
aatatcggggtgacagtggt

SEQ ID NO: 461 - RNA, 20 nt, synthetic construct
  misc_feature 1..20: note = Synthetic
  source 1..20: mol_type = other RNA
acgaggcatctcgccgcgag

SEQ ID NO: 462 - RNA, 20 nt, synthetic construct
  misc_feature 1..20: note = Synthetic
  source 1..20: mol_type = other RNA
agggaggcgatcgataactc

SEQ ID NO: 463 - RNA, 20 nt, synthetic construct
  misc_feature 1..20: note = Synthetic
  source 1..20: mol_type = other RNA
agtcgagctctggcagcgtc

SEQ ID NO: 464 - RNA, 20 nt, synthetic construct
  misc_feature 1..20: note = Synthetic
  source 1..20: mol_type = other RNA
ccacctaggaagatcaggac

SEQ ID NO: 465 - RNA, 20 nt, synthetic construct
  misc_feature 1..20: note = Synthetic
  source 1..20: mol_type = other RNA
ccccgatatttatcccacct

SEQ ID NO: 466 - RNA, 20 nt, synthetic construct
  misc_feature 1..20: note = Synthetic
  source 1..20: mol_type = other RNA
cctagaccaagatggcggct

SEQ ID NO: 467 - RNA, 20 nt, synthetic construct
  misc_feature 1..20: note = Synthetic
  source 1..20: mol_type = other RNA
cgaggcatctcgccgcgagg

SEQ ID NO: 468 - RNA, 20 nt, synthetic construct
  misc_feature 1..20: note = Synthetic
  source 1..20: mol_type = other RNA
cgcacgcgtgagtaaacagc

SEQ ID NO: 469 - RNA, 20 nt, synthetic construct
  misc_feature 1..20: note = Synthetic
  source 1..20: mol_type = other RNA
cggcgagatgcctcgttccc

SEQ ID NO: 470 - RNA, 20 nt, synthetic construct
  misc_feature 1..20: note = Synthetic
  source 1..20: mol_type = other RNA
cgtgagtaaacagccggagc

SEQ ID NO: 471 - RNA, 20 nt, synthetic construct
  misc_feature 1..20: note = Synthetic
  source 1..20: mol_type = other RNA
tccaacagtcagcggcacac

SEQ ID NO: 472 - RNA, 20 nt, synthetic construct
  misc_feature 1..20: note = Synthetic
  source 1..20: mol_type = other RNA
tccggtgtgccgctgactgt

SEQ ID NO: 473 - RNA, 20 nt, synthetic construct
  misc_feature 1..20: note = Synthetic
  source 1..20: mol_type = other RNA
tctcgccgcgagggggcgga

SEQ ID NO: 474 - RNA, 20 nt, synthetic construct
  misc_feature 1..20: note = Synthetic
  source 1..20: mol_type = other RNA
tggctcgaacttctcccgcc

SEQ ID NO: 475 - RNA, 20 nt, synthetic construct
  misc_feature 1..20: note = Synthetic
  source 1..20: mol_type = other RNA
tgtgccgctgactgttggat

SEQ ID NO: 476 - RNA, 20 nt, synthetic construct
  misc_feature 1..20: note = Synthetic
  source 1..20: mol_type = other RNA
ttatcccacctaggaagatc

SEQ ID NO: 477 - RNA, 20 nt, synthetic construct
  misc_feature 1..20: note = Synthetic
  source 1..20: mol_type = other RNA
ttcctaggtgggataaatat

SEQ ID NO: 478 - RNA, 22 nt, synthetic construct
  misc_feature 1..22: note = Synthetic
  source 1..22: mol_type = other RNA
gaaagtcgagctctggcagcgt

SEQ ID NO: 479 - RNA, 22 nt, synthetic construct
  misc_feature 1..22: note = Synthetic
  source 1..22: mol_type = other RNA
ggcatctcgccgcgagggggcg

SEQ ID NO: 480 - RNA, 22 nt, synthetic construct
  misc_feature 1..22: note = Synthetic
  source 1..22: mol_type = other RNA
gggggcggagggtgggcagact

SEQ ID NO: 481 - RNA, 22 nt, synthetic construct
  misc_feature 1..22: note = Synthetic
  source 1..22: mol_type = other RNA
aactccggtgtgccgctgactg

SEQ ID NO: 482 - RNA, 22 nt, synthetic construct
  misc_feature 1..22: note = Synthetic
  source 1..22: mol_type = other RNA
aagatggcggctgggcgggccc

SEQ ID NO: 483 - RNA, 22 nt, synthetic construct
  misc_feature 1..22: note = Synthetic
  source 1..22: mol_type = other RNA
aatccaacagtcagcggcacac

SEQ ID NO: 484 - RNA, 22 nt, synthetic construct
  misc_feature 1..22: note = Synthetic
  source 1..22: mol_type = other RNA
accctgtcctgatcttcctagg

SEQ ID NO: 485 - RNA, 22 nt, synthetic construct
  misc_feature 1..22: note = Synthetic
  source 1..22: mol_type = other RNA
atcccacctaggaagatcagga

SEQ ID NO: 486 - RNA, 22 nt, synthetic construct
  misc_feature 1..22: note = Synthetic
  source 1..22: mol_type = other RNA
ctgggcgggcccaggagtgcgc

SEQ ID NO: 487 - RNA, 22 nt, synthetic construct
  misc_feature 1..22: note = Synthetic
  source 1..22: mol_type = other RNA
taggagggagcgcgccgcacgc

SEQ ID NO: 488 - RNA, 22 nt, synthetic construct
  misc_feature 1..22: note = Synthetic
  source 1..22: mol_type = other RNA
tcttcctaggtgggataaatat

SEQ ID NO: 489 - RNA, 20 nt, synthetic construct
  misc_feature 1..20: note = Synthetic
  source 1..20: mol_type = other RNA
gaacatctcctcaggaactt

SEQ ID NO: 490 - RNA, 20 nt, synthetic construct
  misc_feature 1..20: note = Synthetic
  source 1..20: mol_type = other RNA
gcccccactcgccccgccaa

SEQ ID NO: 491 - RNA, 20 nt, synthetic construct
  misc_feature 1..20: note = Synthetic
  source 1..20: mol_type = other RNA
gccgttggcggggcgagtgg

SEQ ID NO: 492 - RNA, 20 nt, synthetic construct
  misc_feature 1..20: note = Synthetic
  source 1..20: mol_type = other RNA
gcgccgagcgcccgaagcgc

SEQ ID NO: 493 - RNA, 20 nt, synthetic construct
  misc_feature 1..20: note = Synthetic
  source 1..20: mol_type = other RNA
gcgccgccgcggagcctccc

SEQ ID NO: 494 - RNA, 20 nt, synthetic construct
  misc_feature 1..20: note = Synthetic
  source 1..20: mol_type = other RNA
gcgcgcggctcccgcgcttc

SEQ ID NO: 495 - RNA, 20 nt, synthetic construct
  misc_feature 1..20: note = Synthetic
  source 1..20: mol_type = other RNA
gcgcgggcagggccgttggc

SEQ ID NO: 496 - RNA, 20 nt, synthetic construct
  misc_feature 1..20: note = Synthetic
  source 1..20: mol_type = other RNA
gcgctccccctcggtggccg

SEQ ID NO: 497 - RNA, 20 nt, synthetic construct
  misc_feature 1..20: note = Synthetic
  source 1..20: mol_type = other RNA
gcgggatggtgcgtcccgca

SEQ ID NO: 498 - RNA, 20 nt, synthetic construct
  misc_feature 1..20: note = Synthetic
  source 1..20: mol_type = other RNA
gctcccgcgcttcgggcgct

SEQ ID NO: 499 - RNA, 20 nt, synthetic construct
  misc_feature 1..20: note = Synthetic
  source 1..20: mol_type = other RNA
ggaccccgattcgcaggacc

SEQ ID NO: 500 - RNA, 20 nt, synthetic construct
  misc_feature 1..20: note = Synthetic
  source 1..20: mol_type = other RNA
ggaccgggcccgggctgcgc

SEQ ID NO: 501 - RNA, 20 nt, synthetic construct
  misc_feature 1..20: note = Synthetic
  source 1..20: mol_type = other RNA
ggccgttggcggggcgagtg

SEQ ID NO: 502 - RNA, 20 nt, synthetic construct
  misc_feature 1..20: note = Synthetic
  source 1..20: mol_type = other RNA
ggcgctccccctcggtggcc

SEQ ID NO: 503 - RNA, 20 nt, synthetic construct
  misc_feature 1..20: note = Synthetic
  source 1..20: mol_type = other RNA
ggcgggatggtgcgtcccgc

SEQ ID NO: 504 - RNA, 20 nt, synthetic construct
  misc_feature 1..20: note = Synthetic
  source 1..20: mol_type = other RNA
ggctgcgcgggcagggccgt

SEQ ID NO: 505 - RNA, 20 nt, synthetic construct
  misc_feature 1..20: note = Synthetic
  source 1..20: mol_type = other RNA
gggagccgcgcgcgccctgc

SEQ ID NO: 506 - RNA, 20 nt, synthetic construct
  misc_feature 1..20: note = Synthetic
  source 1..20: mol_type = other RNA
gggagcggaccccgattcgc

SEQ ID NO: 507 - RNA, 20 nt, synthetic construct
  misc_feature 1..20: note = Synthetic
  source 1..20: mol_type = other RNA
gggcccggtcctgcgaatcg

SEQ ID NO: 508 - RNA, 20 nt, synthetic construct
  misc_feature 1..20: note = Synthetic
  source 1..20: mol_type = other RNA
gggccgttggcggggcgagt

SEQ ID NO: 509 - RNA, 20 nt, synthetic construct
  misc_feature 1..20: note = Synthetic
  source 1..20: mol_type = other RNA
aacatctcctcaggaacttt

SEQ ID NO: 510 - RNA, 20 nt, synthetic construct
  misc_feature 1..20: note = Synthetic
  source 1..20: mol_type = other RNA
catgatcgcggcggcccggg

SEQ ID NO: 511 - RNA, 20 nt, synthetic construct
  misc_feature 1..20: note = Synthetic
  source 1..20: mol_type = other RNA
ccaggcgcccaaagttcctg

SEQ ID NO: 512 - RNA, 20 nt, synthetic construct
  misc_feature 1..20: note = Synthetic
  source 1..20: mol_type = other RNA
ccgacatgatcgcggcggcc

SEQ ID NO: 513 - RNA, 20 nt, synthetic construct
  misc_feature 1..20: note = Synthetic
  source 1..20: mol_type = other RNA
ccgattcgcaggaccgggcc

SEQ ID NO: 514 - RNA, 20 nt, synthetic construct
  misc_feature 1..20: note = Synthetic
  source 1..20: mol_type = other RNA
ccgggcccggtcctgcgaat

SEQ ID NO: 515 - RNA, 20 nt, synthetic construct
  misc_feature 1..20: note = Synthetic
  source 1..20: mol_type = other RNA
ccgggccgccgcgatcatgt

SEQ ID NO: 516 - RNA, 20 nt, synthetic construct
  misc_feature 1..20: note = Synthetic
  source 1..20: mol_type = other RNA
cctcaggaactttgggcgcc

SEQ ID NO: 517 - RNA, 20 nt, synthetic construct
  misc_feature 1..20: note = Synthetic
  source 1..20: mol_type = other RNA
cgacatgatcgcggcggccc

SEQ ID NO: 518 - RNA, 20 nt, synthetic construct
  misc_feature 1..20: note = Synthetic
  source 1..20: mol_type = other RNA
cgattcgcaggaccgggccc

SEQ ID NO: 519 - RNA, 20 nt, synthetic construct
  misc_feature 1..20: note = Synthetic
  source 1..20: mol_type = other RNA
cgccgcgatcatgtcggacc

SEQ ID NO: 520 - RNA, 20 nt, synthetic construct
  misc_feature 1..20: note = Synthetic
  source 1..20: mol_type = other RNA
cgcctggtccgacatgatcg

SEQ ID NO: 521 - RNA, 20 nt, synthetic construct
  misc_feature 1..20: note = Synthetic
  source 1..20: mol_type = other RNA
cgcgccgagcgcccgaagcg

SEQ ID NO: 522 - RNA, 20 nt, synthetic construct
  misc_feature 1..20: note = Synthetic
  source 1..20: mol_type = other RNA
cgcgcgcggctcccgcgctt

SEQ ID NO: 523 - RNA, 20 nt, synthetic construct
  misc_feature 1..20: note = Synthetic
  source 1..20: mol_type = other RNA
cgcgcttcgggcgctcggcg

SEQ ID NO: 524 - RNA, 20 nt, synthetic construct
  misc_feature 1..20: note = Synthetic
  source 1..20: mol_type = other RNA
cggaccccgattcgcaggac

SEQ ID NO: 525 - RNA, 20 nt, synthetic construct
  misc_feature 1..20: note = Synthetic
  source 1..20: mol_type = other RNA
cgggacgcaccatcccgccc

SEQ ID NO: 526 - RNA, 20 nt, synthetic construct
  misc_feature 1..20: note = Synthetic
  source 1..20: mol_type = other RNA
cgggcccggtcctgcgaatc

SEQ ID NO: 527 - RNA, 20 nt, synthetic construct
  misc_feature 1..20: note = Synthetic
  source 1..20: mol_type = other RNA
ctggtccgacatgatcgcgg

SEQ ID NO: 528 - RNA, 20 nt, synthetic construct
  misc_feature 1..20: note = Synthetic
  source 1..20: mol_type = other RNA
tgcgtcccgcagggcgcgcg

SEQ ID NO: 529 - RNA, 22 nt, synthetic construct
  misc_feature 1..22: note = Synthetic
  source 1..22: mol_type = other RNA
gcccgggcccggtcctgcgaat

SEQ ID NO: 530 - RNA, 22 nt, synthetic construct
  misc_feature 1..22: note = Synthetic
  source 1..22: mol_type = other RNA
ggcgccgcgggggccgggggcg

SEQ ID NO: 531 - RNA, 22 nt, synthetic construct
  misc_feature 1..22: note = Synthetic
  source 1..22: mol_type = other RNA
cgcgcagcccgggcccggtcct

SEQ ID NO: 532 - RNA, 22 nt, synthetic construct
  misc_feature 1..22: note = Synthetic
  source 1..22: mol_type = other RNA
cgcgggcagggccgttggcggg

SEQ ID NO: 533 - RNA, 22 nt, synthetic construct
  misc_feature 1..22: note = Synthetic
  source 1..22: mol_type = other RNA
cgctccccctcggtggccgggg

SEQ ID NO: 534 - RNA, 20 nt, synthetic construct
  misc_feature 1..20: note = Synthetic
  source 1..20: mol_type = other RNA
gacgacaatccacgcatgcg

SEQ ID NO: 535 - RNA, 20 nt, synthetic construct
  misc_feature 1..20: note = Synthetic
  source 1..20: mol_type = other RNA
gagcgaagcgggacgaggcc

SEQ ID NO: 536 - RNA, 20 nt, synthetic construct
  misc_feature 1..20: note = Synthetic
  source 1..20: mol_type = other RNA
gaggcggcacctcgcgtttg

SEQ ID NO: 537 - RNA, 20 nt, synthetic construct
  misc_feature 1..20: note = Synthetic
  source 1..20: mol_type = other RNA
gagggcccacacggaagagg

SEQ ID NO: 538 - RNA, 20 nt, synthetic construct
  misc_feature 1..20: note = Synthetic
  source 1..20: mol_type = other RNA
gaggtgccgcctccttcccg

SEQ ID NO: 539 - RNA, 20 nt, synthetic construct
  misc_feature 1..20: note = Synthetic
  source 1..20: mol_type = other RNA
gataacggcccgcttacctt

SEQ ID NO: 540 - RNA, 20 nt, synthetic construct
  misc_feature 1..20: note = Synthetic
  source 1..20: mol_type = other RNA
gcacatgcgtgatgacgtag

SEQ ID NO: 541 - RNA, 20 nt, synthetic construct
  misc_feature 1..20: note = Synthetic
  source 1..20: mol_type = other RNA
gcatgcgcgggccctgtact

SEQ ID NO: 542 - RNA, 20 nt, synthetic construct
  misc_feature 1..20: note = Synthetic
  source 1..20: mol_type = other RNA
gcccccatagccttgctaga

SEQ ID NO: 543 - RNA, 20 nt, synthetic construct
  misc_feature 1..20: note = Synthetic
  source 1..20: mol_type = other RNA
gccccgccccttcctacgtc

SEQ ID NO: 544 - RNA, 20 nt, synthetic construct
  misc_feature 1..20: note = Synthetic
  source 1..20: mol_type = other RNA
gcccgcttacctttggcgca

SEQ ID NO: 545 - RNA, 20 nt, synthetic construct
  misc_feature 1..20: note = Synthetic
  source 1..20: mol_type = other RNA
gccttaagtgtgcgaatccg

SEQ ID NO: 546 - RNA, 20 nt, synthetic construct
  misc_feature 1..20: note = Synthetic
  source 1..20: mol_type = other RNA
gcgagaccgaccgagcgaag

SEQ ID NO: 547 - RNA, 20 nt, synthetic construct
  misc_feature 1..20: note = Synthetic
  source 1..20: mol_type = other RNA
ggacataggtagaagctggt

SEQ ID NO: 548 - RNA, 20 nt, synthetic construct
  misc_feature 1..20: note = Synthetic
  source 1..20: mol_type = other RNA
ggcccgcttacctttggcgc

SEQ ID NO: 549 - RNA, 20 nt, synthetic construct
  misc_feature 1..20: note = Synthetic
  source 1..20: mol_type = other RNA
gggcggggctttgccgaagg

SEQ ID NO: 550 - RNA, 20 nt, synthetic construct
  misc_feature 1..20: note = Synthetic
  source 1..20: mol_type = other RNA
ggggcggggctctcgctgat

SEQ ID NO: 551 - RNA, 20 nt, synthetic construct
  misc_feature 1..20: note = Synthetic
  source 1..20: mol_type = other RNA
ggggcggggctttgccgaag

SEQ ID NO: 552 - RNA, 20 nt, synthetic construct
  misc_feature 1..20: note = Synthetic
  source 1..20: mol_type = other RNA
gtacagggcccgcgcatgcg

SEQ ID NO: 553 - RNA, 20 nt, synthetic construct
  misc_feature 1..20: note = Synthetic
  source 1..20: mol_type = other RNA
gttgattgggaccgagtaca

SEQ ID NO: 554 - RNA, 20 nt, synthetic construct
  misc_feature 1..20: note = Synthetic
  source 1..20: mol_type = other RNA
accacgctccttcctcggga

SEQ ID NO: 555 - RNA, 20 nt, synthetic construct
  misc_feature 1..20: note = Synthetic
  source 1..20: mol_type = other RNA
acgacaatccacgcatgcgc

SEQ ID NO: 556 - RNA, 20 nt, synthetic construct
  misc_feature 1..20: note = Synthetic
  source 1..20: mol_type = other RNA
atgacgtagagggcgttgat

SEQ ID NO: 557 - RNA, 20 nt, synthetic construct
  misc_feature 1..20: note = Synthetic
  source 1..20: mol_type = other RNA
cacatgcgtgatgacgtaga

SEQ ID NO: 558 - RNA, 20 nt, synthetic construct
  misc_feature 1..20: note = Synthetic
  source 1..20: mol_type = other RNA
cgaccgagcgaagcgggacg

SEQ ID NO: 559 - RNA, 20 nt, synthetic construct
  misc_feature 1..20: note = Synthetic
  source 1..20: mol_type = other RNA
cgagaccgaccgagcgaagc

SEQ ID NO: 560 - RNA, 20 nt, synthetic construct
  misc_feature 1..20: note = Synthetic
  source 1..20: mol_type = other RNA
cgcactatatcgcgtcaggc

SEQ ID NO: 561 - RNA, 20 nt, synthetic construct
  misc_feature 1..20: note = Synthetic
  source 1..20: mol_type = other RNA
cgcccccatagccttgctag

SEQ ID NO: 562 - RNA, 20 nt, synthetic construct
  misc_feature 1..20: note = Synthetic
  source 1..20: mol_type = other RNA
cggggctctcgctgatgggt

SEQ ID NO: 563 - RNA, 20 nt, synthetic construct
  misc_feature 1..20: note = Synthetic
  source 1..20: mol_type = other RNA
cgttgattgggaccgagtac

SEQ ID NO: 564 - RNA, 20 nt, synthetic construct
  misc_feature 1..20: note = Synthetic
  source 1..20: mol_type = other RNA
ctaacgctaaccctctagca

SEQ ID NO: 565 - RNA, 20 nt, synthetic construct
  misc_feature 1..20: note = Synthetic
  source 1..20: mol_type = other RNA
ctcgtcccgcttcgctcggt

SEQ ID NO: 566 - RNA, 20 nt, synthetic construct
  misc_feature 1..20: note = Synthetic
  source 1..20: mol_type = other RNA
ctgatgggttggctttcgtc

SEQ ID NO: 567 - RNA, 20 nt, synthetic construct
  misc_feature 1..20: note = Synthetic
  source 1..20: mol_type = other RNA
tccctgcgccaaaggtaagc

SEQ ID NO: 568 - RNA, 20 nt, synthetic construct
  misc_feature 1..20: note = Synthetic
  source 1..20: mol_type = other RNA
tcctcggattcgcacactta

SEQ ID NO: 569 - RNA, 20 nt, synthetic construct
  misc_feature 1..20: note = Synthetic
  source 1..20: mol_type = other RNA
tcgagtctgtcgctgctcct

SEQ ID NO: 570 - RNA, 20 nt, synthetic construct
  misc_feature 1..20: note = Synthetic
  source 1..20: mol_type = other RNA
tgacgtagagggcgttgatt

SEQ ID NO: 571 - RNA, 20 nt, synthetic construct
  misc_feature 1..20: note = Synthetic
  source 1..20: mol_type = other RNA
tggtcgcttccctgcgccaa

SEQ ID NO: 572 - RNA, 20 nt, synthetic construct
  misc_feature 1..20: note = Synthetic
  source 1..20: mol_type = other RNA
tgtgcgcactatatcgcgtc

SEQ ID NO: 573 - RNA, 20 nt, synthetic construct
  misc_feature 1..20: note = Synthetic
  source 1..20: mol_type = other RNA
tgttgttcgccagctaggcc

SEQ ID NO: 574 - RNA, 22 nt, synthetic construct
  misc_feature 1..22: note = Synthetic
  source 1..22: mol_type = other RNA
gaagggggcggggctctcgctg

SEQ ID NO: 575 - RNA, 22 nt, synthetic construct
  misc_feature 1..22: note = Synthetic
  source 1..22: mol_type = other RNA
gcctagctggcgaacaacacaa

SEQ ID NO: 576 - RNA, 22 nt, synthetic construct
  misc_feature 1..22: note = Synthetic
  source 1..22: mol_type = other RNA
gcgcgcccccatagccttgcta

SEQ ID NO: 577 - RNA, 22 nt, synthetic construct
  misc_feature 1..22: note = Synthetic
  source 1..22: mol_type = other RNA
ggacataggtagaagctggttg

SEQ ID NO: 578 - RNA, 22 nt, synthetic construct
  misc_feature 1..22: note = Synthetic
  source 1..22: mol_type = other RNA
ggttagcgttagccttaagtgt

SEQ ID NO: 579 - RNA, 22 nt, synthetic construct
  misc_feature 1..22: note = Synthetic
  source 1..22: mol_type = other RNA
gtctcgagtctgtcgctgctcc

SEQ ID NO: 580 - RNA, 22 nt, synthetic construct
  misc_feature 1..22: note = Synthetic
  source 1..22: mol_type = other RNA
acacggaagagggggcgggggc

SEQ ID NO: 581 - RNA, 22 nt, synthetic construct
  misc_feature 1..22: note = Synthetic
  source 1..22: mol_type = other RNA
acgtagagggcgttgattggga

SEQ ID NO: 582 - RNA, 22 nt, synthetic construct
  misc_feature 1..22: note = Synthetic
  source 1..22: mol_type = other RNA
cgagtacagggcccgcgcatgc

SEQ ID NO: 583 - RNA, 22 nt, synthetic construct
  misc_feature 1..22: note = Synthetic
  source 1..22: mol_type = other RNA
ttcccgaggaaggagcgtggtc

SEQ ID NO: 584 - RNA, 20 nt, synthetic construct
  misc_feature 1..20: note = Synthetic
  source 1..20: mol_type = other RNA
gaagcgagttgcgacacggc

SEQ ID NO: 585 - RNA, 20 nt, synthetic construct
  misc_feature 1..20: note = Synthetic
  source 1..20: mol_type = other RNA
gaccggcaacatggtgcggt

SEQ ID NO: 586 - RNA, 20 nt, synthetic construct
  misc_feature 1..20: note = Synthetic
  source 1..20: mol_type = other RNA
gacttgggctttacccggac

SEQ ID NO: 587 - RNA, 20 nt, synthetic construct
  misc_feature 1..20: note = Synthetic
  source 1..20: mol_type = other RNA
gagaatgtgcgcatgctcgg

SEQ ID NO: 588 - RNA, 20 nt, synthetic construct
  misc_feature 1..20: note = Synthetic
  source 1..20: mol_type = other RNA
gagccgcttcgtttcctgct

SEQ ID NO: 589 - RNA, 20 nt, synthetic construct
  misc_feature 1..20: note = Synthetic
  source 1..20: mol_type = other RNA
gcaccatgttgccggtcctc

SEQ ID NO: 590 - RNA, 20 nt, synthetic construct
  misc_feature 1..20: note = Synthetic
  source 1..20: mol_type = other RNA
gccgtgtcgcaactcgcttc

SEQ ID NO: 591 - RNA, 20 nt, synthetic construct
  misc_feature 1..20: note = Synthetic
  source 1..20: mol_type = other RNA
gcgcctgaggaccggcaaca

SEQ ID NO: 592 - RNA, 20 nt, synthetic construct
  misc_feature 1..20: note = Synthetic
  source 1..20: mol_type = other RNA
gcgctttggtcgcttcttcc

SEQ ID NO: 593 - RNA, 20 nt, synthetic construct
  misc_feature 1..20: note = Synthetic
  source 1..20: mol_type = other RNA
gctatctgccgcttgtccac

SEQ ID NO: 594 - RNA, 20 nt, synthetic construct
  misc_feature 1..20: note = Synthetic
  source 1..20: mol_type = other RNA
ggaatctgcgcgagctcggc

SEQ ID NO: 595 - RNA, 20 nt, synthetic construct
  misc_feature 1..20: note = Synthetic
  source 1..20: mol_type = other RNA
ggagagaatgtgcgcatgct

SEQ ID NO: 596 - RNA, 20 nt, synthetic construct
  misc_feature 1..20: note = Synthetic
  source 1..20: mol_type = other RNA
ggccggaatctgcgcgagct

SEQ ID NO: 597 - RNA, 20 nt, synthetic construct
  misc_feature 1..20: note = Synthetic
  source 1..20: mol_type = other RNA
ggcgctttggtcgcttcttc

SEQ ID NO: 598 - RNA, 20 nt, synthetic construct
  misc_feature 1..20: note = Synthetic
  source 1..20: mol_type = other RNA
gggaatctgcgcaagctcgg

SEQ ID NO: 599 - RNA, 20 nt, synthetic construct
  misc_feature 1..20: note = Synthetic
  source 1..20: mol_type = other RNA
gggaatctgcgcatgctcgg

SEQ ID NO: 600 - RNA, 20 nt, synthetic construct
  misc_feature 1..20: note = Synthetic
  source 1..20: mol_type = other RNA
ggggcggggaaaccgtgccc

SEQ ID NO: 601 - RNA, 20 nt, synthetic construct
  misc_feature 1..20: note = Synthetic
  source 1..20: mol_type = other RNA
ggtggacaagcggcagatag

SEQ ID NO: 602 - RNA, 20 nt, synthetic construct
  misc_feature 1..20: note = Synthetic
  source 1..20: mol_type = other RNA
gtgtcgcaactcgcttccgg

SEQ ID NO: 603 - RNA, 20 nt, synthetic construct
  misc_feature 1..20: note = Synthetic
  source 1..20: mol_type = other RNA
gtttcctgctaggcctgaaa

SEQ ID NO: 604 - RNA, 20 nt, synthetic construct
  misc_feature 1..20: note = Synthetic
  source 1..20: mol_type = other RNA
accggaagcgagttgcgaca

SEQ ID NO: 605 - RNA, 20 nt, synthetic construct
  misc_feature 1..20: note = Synthetic
  source 1..20: mol_type = other RNA
accggcaacatggtgcggtc

SEQ ID NO: 606 - RNA, 20 nt, synthetic construct
  misc_feature 1..20: note = Synthetic
  source 1..20: mol_type = other RNA
acggtttccccgcccctttc

SEQ ID NO: 607 - RNA, 20 nt, synthetic construct
  misc_feature 1..20: note = Synthetic
  source 1..20: mol_type = other RNA
actcgcttccggtggacaag

SEQ ID NO: 608 - RNA, 20 nt, synthetic construct
  misc_feature 1..20: note = Synthetic
  source 1..20: mol_type = other RNA
acttgggctttacccggact

SEQ ID NO: 609 - RNA, 20 nt, synthetic construct
  misc_feature 1..20: note = Synthetic
  source 1..20: mol_type = other RNA
agaagcgaccaaagcgcctg

SEQ ID NO: 610 - RNA, 20 nt, synthetic construct
  misc_feature 1..20: note = Synthetic
  source 1..20: mol_type = other RNA
catggtgcggtcggggaata

SEQ ID NO: 611 - RNA, 20 nt, synthetic construct
  misc_feature 1..20: note = Synthetic
  source 1..20: mol_type = other RNA
ccacacgctcccgactacgg

SEQ ID NO: 612 - RNA, 20 nt, synthetic construct
  misc_feature 1..20: note = Synthetic
  source 1..20: mol_type = other RNA
ccgcccctttcaggcctagc

SEQ ID NO: 613 - RNA, 20 nt, synthetic construct
  misc_feature 1..20: note = Synthetic
  source 1..20: mol_type = other RNA
ccgccgtagtcgggagcgtg

SEQ ID NO: 614 - RNA, 20 nt, synthetic construct
  misc_feature 1..20: note = Synthetic
  source 1..20: mol_type = other RNA
ccggcaacatggtgcggtcg

SEQ ID NO: 615 - RNA, 20 nt, synthetic construct
  misc_feature 1..20: note = Synthetic
  source 1..20: mol_type = other RNA
cgccgagctcgcgcagattc

SEQ ID NO: 616 - RNA, 20 nt, synthetic construct
  misc_feature 1..20: note = Synthetic
  source 1..20: mol_type = other RNA
cgctcccgactacggcggaa

SEQ ID NO: 617 - RNA, 20 nt, synthetic construct
  misc_feature 1..20: note = Synthetic
  source 1..20: mol_type = other RNA
cgtttcctgctaggcctgaa

SEQ ID NO: 618 - RNA, 20 nt, synthetic construct
  misc_feature 1..20: note = Synthetic
  source 1..20: mol_type = other RNA
ctctccattccgccgtagtc

SEQ ID NO: 619 - RNA, 20 nt, synthetic construct
  misc_feature 1..20: note = Synthetic
  source 1..20: mol_type = other RNA
ctgcgcatgctcagagttcc

SEQ ID NO: 620 - RNA, 20 nt, synthetic construct
  misc_feature 1..20: note = Synthetic
  source 1..20: mol_type = other RNA
tctctccattccgccgtagt

SEQ ID NO: 621 - RNA, 20 nt, synthetic construct
  misc_feature 1..20: note = Synthetic
  source 1..20: mol_type = other RNA
tgcgcatgctcagagttccg

SEQ ID NO: 622 - RNA, 20 nt, synthetic construct
  misc_feature 1..20: note = Synthetic
  source 1..20: mol_type = other RNA
ttgccggtcctcaggcgctt

SEQ ID NO: 623 - RNA, 20 nt, synthetic construct
  misc_feature 1..20: note = Synthetic
  source 1..20: mol_type = other RNA
tttggtcgcttcttccgggc

SEQ ID NO: 624 - RNA, 22 nt, synthetic construct
  misc_feature 1..22: note = Synthetic
  source 1..22: mol_type = other RNA
gaccggcaacatggtgcggtcg

SEQ ID NO: 625 - RNA, 22 nt, synthetic construct
  misc_feature 1..22: note = Synthetic
  source 1..22: mol_type = other RNA
agagaatctgcgcatgctcggc

SEQ ID NO: 626 - RNA, 22 nt, synthetic construct
  misc_feature 1..22: note = Synthetic
  source 1..22: mol_type = other RNA
agagaatgtgcgcatgctcggc

SEQ ID NO: 627 - RNA, 22 nt, synthetic construct
  misc_feature 1..22: note = Synthetic
  source 1..22: mol_type = other RNA
atctgccgcttgtccaccggaa

SEQ ID NO: 628 - RNA, 22 nt, synthetic construct
  misc_feature 1..22: note = Synthetic
  source 1..22: mol_type = other RNA
caccacacgctcccgactacgg

SEQ ID NO: 629 - RNA, 22 nt, synthetic construct
  misc_feature 1..22: note = Synthetic
  source 1..22: mol_type = other RNA
ccggaatctgcgcgagctcggc

SEQ ID NO: 630 - RNA, 22 nt, synthetic construct
  misc_feature 1..22: note = Synthetic
  source 1..22: mol_type = other RNA
cgggaatctgcgcaagctcggc

SEQ ID NO: 631 - RNA, 22 nt, synthetic construct
  misc_feature 1..22: note = Synthetic
  source 1..22: mol_type = other RNA
cgggaatctgcgcatgctcgga

SEQ ID NO: 632 - RNA, 22 nt, synthetic construct
  misc_feature 1..22: note = Synthetic
  source 1..22: mol_type = other RNA
cgggaatctgcgcatgctcggc

SEQ ID NO: 633 - RNA, 22 nt, synthetic construct
  misc_feature 1..22: note = Synthetic
  source 1..22: mol_type = other RNA
ctcccgactacggcggaatgga

SEQ ID NO: 634 - RNA, 22 nt, synthetic construct
  misc_feature 1..22: note = Synthetic
  source 1..22: mol_type = other RNA
tcggcgggaatctgcgcatgct

SEQ ID NO: 635 - RNA, 20 nt, synthetic construct
  misc_feature 1..20: note = Synthetic
  source 1..20: mol_type = other RNA
gcacgcgcgggagcgggact

SEQ ID NO: 636 - RNA, 20 nt, synthetic construct
  misc_feature 1..20: note = Synthetic
  source 1..20: mol_type = other RNA
gcagccccgcctccgcgcgt

SEQ ID NO: 637 - RNA, 20 nt, synthetic construct
  misc_feature 1..20: note = Synthetic
  source 1..20: mol_type = other RNA
gccttcccgcaggggtcccc

SEQ ID NO: 638 - RNA, 20 nt, synthetic construct
  misc_feature 1..20: note = Synthetic
  source 1..20: mol_type = other RNA
gcgcccgctcggcccggacc

SEQ ID NO: 639 - RNA, 20 nt, synthetic construct
  misc_feature 1..20: note = Synthetic
  source 1..20: mol_type = other RNA
gcgcgtgcgcccgctcggcc

SEQ ID NO: 640 - RNA, 20 nt, synthetic construct
  misc_feature 1..20: note = Synthetic
  source 1..20: mol_type = other RNA
gcggcggcaggaactttccc

SEQ ID NO: 641 - RNA, 20 nt, synthetic construct
  misc_feature 1..20: note = Synthetic
  source 1..20: mol_type = other RNA
gcgggactcggcggcatggc

SEQ ID NO: 642 - RNA, 20 nt, synthetic construct
  misc_feature 1..20: note = Synthetic
  source 1..20: mol_type = other RNA
gcgggcgcacgcgcgggagc

SEQ ID NO: 643 - RNA, 20 nt, synthetic construct
  misc_feature 1..20: note = Synthetic
  source 1..20: mol_type = other RNA
ggaaatgcccctacgcgcgg

SEQ ID NO: 644 - RNA, 20 nt, synthetic construct
  misc_feature 1..20: note = Synthetic
  source 1..20: mol_type = other RNA
ggagcaacgcacaccggctc

SEQ ID NO: 645 - RNA, 20 nt, synthetic construct
  misc_feature 1..20: note = Synthetic
  source 1..20: mol_type = other RNA
ggcatggcgggctccggagc

SEQ ID NO: 646 - RNA, 20 nt, synthetic construct
  misc_feature 1..20: note = Synthetic
  source 1..20: mol_type = other RNA
ggccaaagaggcgcgcttac

SEQ ID NO: 647 - RNA, 20 nt, synthetic construct
  misc_feature 1..20: note = Synthetic
  source 1..20: mol_type = other RNA
ggccagtaagcgcgcctctt

SEQ ID NO: 648 - RNA, 20 nt, synthetic construct
  misc_feature 1..20: note = Synthetic
  source 1..20: mol_type = other RNA
ggccgagcgggcgcacgcgc

SEQ ID NO: 649 - RNA, 20 nt, synthetic construct
  misc_feature 1..20: note = Synthetic
  source 1..20: mol_type = other RNA
ggccttcccgcaggggtccc

SEQ ID NO: 650 - RNA, 20 nt, synthetic construct
  misc_feature 1..20: note = Synthetic
  source 1..20: mol_type = other RNA
gggacccctgcgggaaggcc

SEQ ID NO: 651 - RNA, 20 nt, synthetic construct
  misc_feature 1..20: note = Synthetic
  source 1..20: mol_type = other RNA
gggagcgggactcggcggca

SEQ ID NO: 652 - RNA, 20 nt, synthetic construct
  misc_feature 1..20: note = Synthetic
  source 1..20: mol_type = other RNA
gggccgagcgggcgcacgcg

SEQ ID NO: 653 - RNA, 20 nt, synthetic construct
  misc_feature 1..20: note = Synthetic
  source 1..20: mol_type = other RNA
gtaggggcatttccgggtcc

SEQ ID NO: 654 - RNA, 20 nt, synthetic construct
  misc_feature 1..20: note = Synthetic
  source 1..20: mol_type = other RNA
gtgtgcgttgctccctgctg

SEQ ID NO: 655 - RNA, 20 nt, synthetic construct
  misc_feature 1..20: note = Synthetic
  source 1..20: mol_type = other RNA
aagaggcgcgcttactggcc

SEQ ID NO: 656 - RNA, 20 nt, synthetic construct
  misc_feature 1..20: note = Synthetic
  source 1..20: mol_type = other RNA
aatgcccctacgcgcggagg

SEQ ID NO: 657 - RNA, 20 nt, synthetic construct
  misc_feature 1..20: note = Synthetic
  source 1..20: mol_type = other RNA
actttcccggggacccctgc

SEQ ID NO: 658 - RNA, 20 nt, synthetic construct
  misc_feature 1..20: note = Synthetic
  source 1..20: mol_type = other RNA
agccccgcctccgcgcgtag

SEQ ID NO: 659 - RNA, 20 nt, synthetic construct
  misc_feature 1..20: note = Synthetic
  source 1..20: mol_type = other RNA
agcgggactcggcggcatgg

SEQ ID NO: 660 - RNA, 20 nt, synthetic construct
  misc_feature 1..20: note = Synthetic
  source 1..20: mol_type = other RNA
atgcccctacgcgcggaggc

SEQ ID NO: 661 - RNA, 20 nt, synthetic construct
  misc_feature 1..20: note = Synthetic
  source 1..20: mol_type = other RNA
atttccgggtccgggccgag

SEQ ID NO: 662 - RNA, 20 nt, synthetic construct
  misc_feature 1..20: note = Synthetic
  source 1..20: mol_type = other RNA
cagccccgcctccgcgcgta

SEQ ID NO: 663 - RNA, 20 nt, synthetic construct
  misc_feature 1..20: note = Synthetic
  source 1..20: mol_type = other RNA
catgttgattcgggccaaag

SEQ ID NO: 664 - RNA, 20 nt, synthetic construct
  misc_feature 1..20: note = Synthetic
  source 1..20: mol_type = other RNA
cccggaaatgcccctacgcg

SEQ ID NO: 665 - RNA, 20 nt, synthetic construct
  misc_feature 1..20: note = Synthetic
  source 1..20: mol_type = other RNA
ccgcgcgtaggggcatttcc

SEQ ID NO: 666 - RNA, 20 nt, synthetic construct
  misc_feature 1..20: note = Synthetic
  source 1..20: mol_type = other RNA
cgaatcaacatggaaaccta

SEQ ID NO: 667 - RNA, 20 nt, synthetic construct
  misc_feature 1..20: note = Synthetic
  source 1..20: mol_type = other RNA
cgcggcggcaggaactttcc

SEQ ID NO: 668 - RNA, 20 nt, synthetic construct
  misc_feature 1..20: note = Synthetic
  source 1..20: mol_type = other RNA
cggcggcaggaactttcccg

SEQ ID NO: 669 - RNA, 20 nt, synthetic construct
  misc_feature 1..20: note = Synthetic
  source 1..20: mol_type = other RNA
cgtaggggcatttccgggtc

SEQ ID NO: 670 - RNA, 20 nt, synthetic construct
  misc_feature 1..20: note = Synthetic
  source 1..20: mol_type = other RNA
ctcggcggcatggcgggctc

SEQ ID NO: 671 - RNA, 20 nt, synthetic construct
  misc_feature 1..20: note = Synthetic
  source 1..20: mol_type = other RNA
ctctttggcccgaatcaaca

SEQ ID NO: 672 - RNA, 20 nt, synthetic construct
  misc_feature 1..20: note = Synthetic
  source 1..20: mol_type = other RNA
tccgcgcgtaggggcatttc

SEQ ID NO: 673 - RNA, 20 nt, synthetic construct
  misc_feature 1..20: note = Synthetic
  source 1..20: mol_type = other RNA
tgcccctacgcgcggaggcg

SEQ ID NO: 674 - RNA, 20 nt, synthetic construct
  misc_feature 1..20: note = Synthetic
  source 1..20: mol_type = other RNA
tttccgggtccgggccgagc

SEQ ID NO: 675 - RNA, 22 nt, synthetic construct
  misc_feature 1..22: note = Synthetic
  source 1..22: mol_type = other RNA
gcctccgcgcgtaggggcattt

SEQ ID NO: 676 - RNA, 22 nt, synthetic construct
  misc_feature 1..22: note = Synthetic
  source 1..22: mol_type = other RNA
ggctccggagcccgccatgccg

SEQ ID NO: 677 - RNA, 22 nt, synthetic construct
  misc_feature 1..22: note = Synthetic
  source 1..22: mol_type = other RNA
ccagtaagcgcgcctctttggc

SEQ ID NO: 678 - RNA, 22 nt, synthetic construct
  misc_feature 1..22: note = Synthetic
  source 1..22: mol_type = other RNA
cttactggccaggccttcccgc

SEQ ID NO: 679 - RNA, 20 nt, synthetic construct
  misc_feature 1..20: note = Synthetic
  source 1..20: mol_type = other RNA
gacgtcaggtgggaagggtg

SEQ ID NO: 680 - RNA, 20 nt, synthetic construct
  misc_feature 1..20: note = Synthetic
  source 1..20: mol_type = other RNA
gcagccaggctcgcgatggg

SEQ ID NO: 681 - RNA, 20 nt, synthetic construct
  misc_feature 1..20: note = Synthetic
  source 1..20: mol_type = other RNA
gcaggcgcaggggagacccg

SEQ ID NO: 682 - RNA, 20 nt, synthetic construct
  misc_feature 1..20: note = Synthetic
  source 1..20: mol_type = other RNA
gccaggctcgcgatgggagg

SEQ ID NO: 683 - RNA, 20 nt, synthetic construct
  misc_feature 1..20: note = Synthetic
  source 1..20: mol_type = other RNA
gcccggtgactgcaaggccc

SEQ ID NO: 684 - RNA, 20 nt, synthetic construct
  misc_feature 1..20: note = Synthetic
  source 1..20: mol_type = other RNA
gcgcaggcgcaggggagacc

SEQ ID NO: 685 - RNA, 20 nt, synthetic construct
  misc_feature 1..20: note = Synthetic
  source 1..20: mol_type = other RNA
gcgcctgcgcggcgagcagc

SEQ ID NO: 686 - RNA, 20 nt, synthetic construct
  misc_feature 1..20: note = Synthetic
  source 1..20: mol_type = other RNA
gctcgcgatgggaggtgggg

SEQ ID NO: 687 - RNA, 20 nt, synthetic construct
  misc_feature 1..20: note = Synthetic
  source 1..20: mol_type = other RNA
gctgctcgccgcgcaggcgc

SEQ ID NO: 688 - RNA, 20 nt, synthetic construct
  misc_feature 1..20: note = Synthetic
  source 1..20: mol_type = other RNA
gcttcaggcttgacgtcagg

SEQ ID NO: 689 - RNA, 20 nt, synthetic construct
  misc_feature 1..20: note = Synthetic
  source 1..20: mol_type = other RNA
gcttgagcccggtgactgca

SEQ ID NO: 690 - RNA, 20 nt, synthetic construct
  misc_feature 1..20: note = Synthetic
  source 1..20: mol_type = other RNA
ggcgcagccaggctcgcgat

SEQ ID NO: 691 - RNA, 20 nt, synthetic construct
  misc_feature 1..20: note = Synthetic
  source 1..20: mol_type = other RNA
ggcgccagcttccggcttag

SEQ ID NO: 692 - RNA, 20 nt, synthetic construct
  misc_feature 1..20: note = Synthetic
  source 1..20: mol_type = other RNA
ggctcgcgatgggaggtggg

SEQ ID NO: 693 - RNA, 20 nt, synthetic construct
  misc_feature 1..20: note = Synthetic
  source 1..20: mol_type = other RNA
ggcttgacgtcaggtgggaa

SEQ ID NO: 694 - RNA, 20 nt, synthetic construct
  misc_feature 1..20: note = Synthetic
  source 1..20: mol_type = other RNA
ggggcggttgggaggttggg

SEQ ID NO: 695 - RNA, 20 nt, synthetic construct
  misc_feature 1..20: note = Synthetic
  source 1..20: mol_type = other RNA
gggtctcccctgcgcctgcg

SEQ ID NO: 696 - RNA, 20 nt, synthetic construct
  misc_feature 1..20: note = Synthetic
  source 1..20: mol_type = other RNA
ggtggcaggtgggggcggtt

SEQ ID NO: 697 - RNA, 20 nt, synthetic construct
  misc_feature 1..20: note = Synthetic
  source 1..20: mol_type = other RNA
gtcaccgggctcaagcacgc

SEQ ID NO: 698 - RNA, 20 nt, synthetic construct
  misc_feature 1..20: note = Synthetic
  source 1..20: mol_type = other RNA
gtgggggcggttgggaggtt

SEQ ID NO: 699 - RNA, 20 nt, synthetic construct
  misc_feature 1..20: note = Synthetic
  source 1..20: mol_type = other RNA
acccggggccttgcagtcac

SEQ ID NO: 700 - RNA, 20 nt, synthetic construct
  misc_feature 1..20: note = Synthetic
  source 1..20: mol_type = other RNA
acgtcaggtgggaagggtgt

SEQ ID NO: 701 - RNA, 20 nt, synthetic construct
  misc_feature 1..20: note = Synthetic
  source 1..20: mol_type = other RNA
aggcttgacgtcaggtggga

SEQ ID NO: 702 - RNA, 20 nt, synthetic construct
  misc_feature 1..20: note = Synthetic
  source 1..20: mol_type = other RNA
caggctcgcgatgggaggtg

SEQ ID NO: 703 - RNA, 20 nt, synthetic construct
  misc_feature 1..20: note = Synthetic
  source 1..20: mol_type = other RNA
catcgcgagcctggctgcgc

SEQ ID NO: 704 - RNA, 20 nt, synthetic construct
  misc_feature 1..20: note = Synthetic
  source 1..20: mol_type = other RNA
catcttctggcgccagcttc

SEQ ID NO: 705 - RNA, 20 nt, synthetic construct
  misc_feature 1..20: note = Synthetic
  source 1..20: mol_type = other RNA
ccaggctcgcgatgggaggt

SEQ ID NO: 706 - RNA, 20 nt, synthetic construct
  misc_feature 1..20: note = Synthetic
  source 1..20: mol_type = other RNA
cccacctcccatcgcgagcc

SEQ ID NO: 707 - RNA, 20 nt, synthetic construct
  misc_feature 1..20: note = Synthetic
  source 1..20: mol_type = other RNA
cccggggccttgcagtcacc

SEQ ID NO: 708 - RNA, 20 nt, synthetic construct
  misc_feature 1..20: note = Synthetic
  source 1..20: mol_type = other RNA
cccggtgactgcaaggcccc

SEQ ID NO: 709 - RNA, 20 nt, synthetic construct
  misc_feature 1..20: note = Synthetic
  source 1..20: mol_type = other RNA
cgcaggcgcaggggagaccc

SEQ ID NO: 710 - RNA, 20 nt, synthetic construct
  misc_feature 1..20: note = Synthetic
  source 1..20: mol_type = other RNA
cggcgagcagctggcggaac

SEQ ID NO: 711 - RNA, 20 nt, synthetic construct
  misc_feature 1..20: note = Synthetic
  source 1..20: mol_type = other RNA
cggcgcagccaggctcgcga

SEQ ID NO: 712 - RNA, 20 nt, synthetic construct
  misc_feature 1..20: note = Synthetic
  source 1..20: mol_type = other RNA
cggcttagcggctgagcttc

SEQ ID NO: 713 - RNA, 20 nt, synthetic construct
  misc_feature 1..20: note = Synthetic
  source 1..20: mol_type = other RNA
ctgaagctcagccgctaagc

SEQ ID NO: 714 - RNA, 20 nt, synthetic construct
  misc_feature 1..20: note = Synthetic
  source 1..20: mol_type = other RNA
ctggcggaaccggcatcttc

SEQ ID NO: 715 - RNA, 20 nt, synthetic construct
  misc_feature 1..20: note = Synthetic
  source 1..20: mol_type = other RNA
tcaagcacgccggcgcagcc

SEQ ID NO: 716 - RNA, 20 nt, synthetic construct
  misc_feature 1..20: note = Synthetic
  source 1..20: mol_type = other RNA
tcagccgctaagccggaagc

SEQ ID NO: 717 - RNA, 20 nt, synthetic construct
  misc_feature 1..20: note = Synthetic
  source 1..20: mol_type = other RNA
tgagcttcaggcttgacgtc

SEQ ID NO: 718 - RNA, 20 nt, synthetic construct
  misc_feature 1..20: note = Synthetic
  source 1..20: mol_type = other RNA
tgcgccggcgtgcttgagcc

SEQ ID NO: 719 - RNA, 22 nt, synthetic construct
  misc_feature 1..22: note = Synthetic
  source 1..22: mol_type = other RNA
ggttggggggggttggggtggg

SEQ ID NO: 720 - RNA, 22 nt, synthetic construct
  misc_feature 1..22: note = Synthetic
  source 1..22: mol_type = other RNA
cggttgggaggttggggggggt

SEQ ID NO: 721 - RNA, 22 nt, synthetic construct
  misc_feature 1..22: note = Synthetic
  source 1..22: mol_type = other RNA
tgagcccggtgactgcaaggcc

SEQ ID NO: 722 - RNA, 22 nt, synthetic construct
  misc_feature 1..22: note = Synthetic
  source 1..22: mol_type = other RNA
tgggggcggttgggaggttggg

SEQ ID NO: 723 - RNA, 22 nt, synthetic construct
  misc_feature 1..22: note = Synthetic
  source 1..22: mol_type = other RNA
ttcaggcttgacgtcaggtggg

SEQ ID NO: 724 - RNA, 22 nt, synthetic construct
  misc_feature 1..22: note = Synthetic
  source 1..22: mol_type = other RNA
ttgacgtcaggtgggaagggtg

SEQ ID NO: 725 - RNA, 20 nt, synthetic construct
  misc_feature 1..20: note = Synthetic
  source 1..20: mol_type = other RNA
gaagtagctgatactctcat

SEQ ID NO: 726 - RNA, 20 nt, synthetic construct
  misc_feature 1..20: note = Synthetic
  source 1..20: mol_type = other RNA
gacaagcccaaccggacggc

SEQ ID NO: 727 - RNA, 20 nt, synthetic construct
  misc_feature 1..20: note = Synthetic
  source 1..20: mol_type = other RNA
gacggctggagagggcgaga

SEQ ID NO: 728 - RNA, 20 nt, synthetic construct
  misc_feature 1..20: note = Synthetic
  source 1..20: mol_type = other RNA
gagagggcgagaagggcaga

SEQ ID NO: 729 - RNA, 20 nt, synthetic construct
  misc_feature 1..20: note = Synthetic
  source 1..20: mol_type = other RNA
gagaggtaggatccggaagt

SEQ ID NO: 730 - RNA, 20 nt, synthetic construct
  misc_feature 1..20: note = Synthetic
  source 1..20: mol_type = other RNA
gatcacgtcccgcaggccgg

SEQ ID NO: 731 - RNA, 20 nt, synthetic construct
  misc_feature 1..20: note = Synthetic
  source 1..20: mol_type = other RNA
gatctaaatcccgccttttc

SEQ ID NO: 732 - RNA, 20 nt, synthetic construct
  misc_feature 1..20: note = Synthetic
  source 1..20: mol_type = other RNA
gcaccgcctaccaagacggg

SEQ ID NO: 733 - RNA, 20 nt, synthetic construct
  misc_feature 1..20: note = Synthetic
  source 1..20: mol_type = other RNA
gcccaaccggacggctggag

SEQ ID NO: 734 - RNA, 20 nt, synthetic construct
  misc_feature 1..20: note = Synthetic
  source 1..20: mol_type = other RNA
gccctctccagccgtccggt

SEQ ID NO: 735 - RNA, 20 nt, synthetic construct
  misc_feature 1..20: note = Synthetic
  source 1..20: mol_type = other RNA
gcgggcgttttggaagatac

SEQ ID NO: 736 - RNA, 20 nt, synthetic construct
  misc_feature 1..20: note = Synthetic
  source 1..20: mol_type = other RNA
ggagaggtaggatccggaag

SEQ ID NO: 737 - RNA, 20 nt, synthetic construct
  misc_feature 1..20: note = Synthetic
  source 1..20: mol_type = other RNA
ggatttagatcacgtcccgc

SEQ ID NO: 738 - RNA, 20 nt, synthetic construct
  misc_feature 1..20: note = Synthetic
  source 1..20: mol_type = other RNA
ggcggttaagacactaggat

SEQ ID NO: 739 - RNA, 20 nt, synthetic construct
  misc_feature 1..20: note = Synthetic
  source 1..20: mol_type = other RNA
ggtgccgtgacaagcccaac

SEQ ID NO: 740 - RNA, 20 nt, synthetic construct
  misc_feature 1..20: note = Synthetic
  source 1..20: mol_type = other RNA
acgcccgctttcacagatca

SEQ ID NO: 741 - RNA, 20 nt, synthetic construct
  misc_feature 1..20: note = Synthetic
  source 1..20: mol_type = other RNA
acggcaccgcctaccaagac

SEQ ID NO: 742 - RNA, 20 nt, synthetic construct
  misc_feature 1..20: note = Synthetic
  source 1..20: mol_type = other RNA
agacgggcggttaagacact

SEQ ID NO: 743 - RNA, 20 nt, synthetic construct
  misc_feature 1..20: note = Synthetic
  source 1..20: mol_type = other RNA
agagtatcagctacttccgc

SEQ ID NO: 744 - RNA, 20 nt, synthetic construct
  misc_feature 1..20: note = Synthetic
  source 1..20: mol_type = other RNA
agataccggaagtagagtca

SEQ ID NO: 745 - RNA, 20 nt, synthetic construct
  misc_feature 1..20: note = Synthetic
  source 1..20: mol_type = other RNA
agctacttccgccggcctgc

SEQ ID NO: 746 - RNA, 20 nt, synthetic construct
  misc_feature 1..20: note = Synthetic
  source 1..20: mol_type = other RNA
agtcacggagaggtaggatc

SEQ ID NO: 747 - RNA, 20 nt, synthetic construct
  misc_feature 1..20: note = Synthetic
  source 1..20: mol_type = other RNA
agtgtcttaaccgcccgtct

SEQ ID NO: 748 - RNA, 20 nt, synthetic construct
  misc_feature 1..20: note = Synthetic
  source 1..20: mol_type = other RNA
atctgtgaaagcgggcgttt

SEQ ID NO: 749 - RNA, 20 nt, synthetic construct
  misc_feature 1..20: note = Synthetic
  source 1..20: mol_type = other RNA
cacggcaccgcctaccaaga

SEQ ID NO: 750 - RNA, 20 nt, synthetic construct
  misc_feature 1..20: note = Synthetic
  source 1..20: mol_type = other RNA
cccaaccggacggctggaga

SEQ ID NO: 751 - RNA, 20 nt, synthetic construct
  misc_feature 1..20: note = Synthetic
  source 1..20: mol_type = other RNA
ccctctccagccgtccggtt

SEQ ID NO: 752 - RNA, 20 nt, synthetic construct
  misc_feature 1..20: note = Synthetic
  source 1..20: mol_type = other RNA
ccggaagtagagtcacggag

SEQ ID NO: 753 - RNA, 20 nt, synthetic construct
  misc_feature 1..20: note = Synthetic
  source 1..20: mol_type = other RNA
ccgtccggttgggcttgtca

SEQ ID NO: 754 - RNA, 20 nt, synthetic construct
  misc_feature 1..20: note = Synthetic
  source 1..20: mol_type = other RNA
ccgtgacaagcccaaccgga

SEQ ID NO: 755 - RNA, 20 nt, synthetic construct
  misc_feature 1..20: note = Synthetic
  source 1..20: mol_type = other RNA
ctaaatcccgccttttccgg

SEQ ID NO: 756 - RNA, 20 nt, synthetic construct
  misc_feature 1..20: note = Synthetic
  source 1..20: mol_type = other RNA
taaccgcccgtcttggtagg

SEQ ID NO: 757 - RNA, 20 nt, synthetic construct
  misc_feature 1..20: note = Synthetic
  source 1..20: mol_type = other RNA
tcccgccttttccggtggag

SEQ ID NO: 758 - RNA, 20 nt, synthetic construct
  misc_feature 1..20: note = Synthetic
  source 1..20: mol_type = other RNA
tcttaaccgcccgtcttggt

SEQ ID NO: 759 - RNA, 20 nt, synthetic construct
  misc_feature 1..20: note = Synthetic
  source 1..20: mol_type = other RNA
ttagatcacgtcccgcaggc

SEQ ID NO: 760 - RNA, 22 nt, synthetic construct
  misc_feature 1..22: note = Synthetic
  source 1..22: mol_type = other RNA
gcgttttggaagataccggaag

SEQ ID NO: 761 - RNA, 22 nt, synthetic construct
  misc_feature 1..22: note = Synthetic
  source 1..22: mol_type = other RNA
ggctcctctccaccggaaaagg

SEQ ID NO: 762 - RNA, 22 nt, synthetic construct
  misc_feature 1..22: note = Synthetic
  source 1..22: mol_type = other RNA
agatcaaggttttgcaaccaat

SEQ ID NO: 763 - RNA, 22 nt, synthetic construct
  misc_feature 1..22: note = Synthetic
  source 1..22: mol_type = other RNA
atttaaagaggcagccccactt

SEQ ID NO: 764 - RNA, 22 nt, synthetic construct
  misc_feature 1..22: note = Synthetic
  source 1..22: mol_type = other RNA
ccaagacgggcggttaagacac

SEQ ID NO: 765 - RNA, 22 nt, synthetic construct
  misc_feature 1..22: note = Synthetic
  source 1..22: mol_type = other RNA
cggaagtagagtcacggagagg

SEQ ID NO: 766 - RNA, 20 nt, synthetic construct
  misc_feature 1..20: note = Synthetic
  source 1..20: mol_type = other RNA
gcagtccgctggctgctgcc

SEQ ID NO: 767 - RNA, 20 nt, synthetic construct
  misc_feature 1..20: note = Synthetic
  source 1..20: mol_type = other RNA
gccagcggactgcgcacgcg

SEQ ID NO: 768 - RNA, 20 nt, synthetic construct
  misc_feature 1..20: note = Synthetic
  source 1..20: mol_type = other RNA
gcccgctcgcgcaaaccgaa

SEQ ID NO: 769 - RNA, 20 nt, synthetic construct
  misc_feature 1..20: note = Synthetic
  source 1..20: mol_type = other RNA
gcctttcggtttgcgcgagc

SEQ ID NO: 770 - RNA, 20 nt, synthetic construct
  misc_feature 1..20: note = Synthetic
  source 1..20: mol_type = other RNA
gcgacgaagccgctggtggc

SEQ ID NO: 771 - RNA, 20 nt, synthetic construct
  misc_feature 1..20: note = Synthetic
  source 1..20: mol_type = other RNA
gcgattccacctaccgtcag

SEQ ID NO: 772 - RNA, 20 nt, synthetic construct
  misc_feature 1..20: note = Synthetic
  source 1..20: mol_type = other RNA
gcgctccctccagggagaaa

SEQ ID NO: 773 - RNA, 20 nt, synthetic construct
  misc_feature 1..20: note = Synthetic
  source 1..20: mol_type = other RNA
gcggcttcgtcgcaccaaac

SEQ ID NO: 774 - RNA, 20 nt, synthetic construct
  misc_feature 1..20: note = Synthetic
  source 1..20: mol_type = other RNA
gcgtctgagcagcccctcgc

SEQ ID NO: 775 - RNA, 20 nt, synthetic construct
  misc_feature 1..20: note = Synthetic
  source 1..20: mol_type = other RNA
gctcgagtgaaggtactcgt

SEQ ID NO: 776 - RNA, 20 nt, synthetic construct
  misc_feature 1..20: note = Synthetic
  source 1..20: mol_type = other RNA
gctgcccggcgtggatggta

SEQ ID NO: 777 - RNA, 20 nt, synthetic construct
  misc_feature 1..20: note = Synthetic
  source 1..20: mol_type = other RNA
gctgctcagacgctgcgggt

SEQ ID NO: 778 - RNA, 20 nt, synthetic construct
  misc_feature 1..20: note = Synthetic
  source 1..20: mol_type = other RNA
ggcctatgcctggcgtgggc

SEQ ID NO: 779 - RNA, 20 nt, synthetic construct
  misc_feature 1..20: note = Synthetic
  source 1..20: mol_type = other RNA
ggcctttcggtttgcgcgag

SEQ ID NO: 780 - RNA, 20 nt, synthetic construct
  misc_feature 1..20: note = Synthetic
  source 1..20: mol_type = other RNA
ggcgctctcgcggccgctga

SEQ ID NO: 781 - RNA, 20 nt, synthetic construct
  misc_feature 1..20: note = Synthetic
  source 1..20: mol_type = other RNA
ggtcttgggatacaggggcg

SEQ ID NO: 782 - RNA, 20 nt, synthetic construct
  misc_feature 1..20: note = Synthetic
  source 1..20: mol_type = other RNA
ggtggaatcgcgttcgagtc

SEQ ID NO: 783 - RNA, 20 nt, synthetic construct
  misc_feature 1..20: note = Synthetic
  source 1..20: mol_type = other RNA
gtgcgtgcggctaagagagt

SEQ ID NO: 784 - RNA, 20 nt, synthetic construct
  misc_feature 1..20: note = Synthetic
  source 1..20: mol_type = other RNA
gtggaatcgcgttcgagtcc

SEQ ID NO: 785 - RNA, 20 nt, synthetic construct
  misc_feature 1..20: note = Synthetic
  source 1..20: mol_type = other RNA
gtttggtgcgacgaagccgc

SEQ ID NO: 786 - RNA, 20 nt, synthetic construct
  misc_feature 1..20: note = Synthetic
  source 1..20: mol_type = other RNA
aatcgcgttcgagtccgggc

SEQ ID NO: 787 - RNA, 20 nt, synthetic construct
  misc_feature 1..20: note = Synthetic
  source 1..20: mol_type = other RNA
accctgcctcctcttgcggt

SEQ ID NO: 788 - RNA, 20 nt, synthetic construct
  misc_feature 1..20: note = Synthetic
  source 1..20: mol_type = other RNA
accgaaaggcctagagtaag

SEQ ID NO: 789 - RNA, 20 nt, synthetic construct
  misc_feature 1..20: note = Synthetic
  source 1..20: mol_type = other RNA
cagacgctgcgggttggccc

SEQ ID NO: 790 - RNA, 20 nt, synthetic construct
  misc_feature 1..20: note = Synthetic
  source 1..20: mol_type = other RNA
cgagccctaccatccacgcc

SEQ ID NO: 791 - RNA, 20 nt, synthetic construct
  misc_feature 1..20: note = Synthetic
  source 1..20: mol_type = other RNA
cgctggccttttctccctgg

SEQ ID NO: 792 - RNA, 20 nt, synthetic construct
  misc_feature 1..20: note = Synthetic
  source 1..20: mol_type = other RNA
cgctttccccccaccgcaag

SEQ ID NO: 793 - RNA, 20 nt, synthetic construct
  misc_feature 1..20: note = Synthetic
  source 1..20: mol_type = other RNA
cgggcaggaaagcgtgcgtg

SEQ ID NO: 794 - RNA, 20 nt, synthetic construct
  misc_feature 1..20: note = Synthetic
  source 1..20: mol_type = other RNA
cgtgcgtgcggctaagagag

SEQ ID NO: 795 - RNA, 20 nt, synthetic construct
  misc_feature 1..20: note = Synthetic
  source 1..20: mol_type = other RNA
ctccacttaccctggccact

SEQ ID NO: 796 - RNA, 20 nt, synthetic construct
  misc_feature 1..20: note = Synthetic
  source 1..20: mol_type = other RNA
ctgcctcctcttgcggtggg

SEQ ID NO: 797 - RNA, 20 nt, synthetic construct
  misc_feature 1..20: note = Synthetic
  source 1..20: mol_type = other RNA
ctgcgggttggccctggcgc

SEQ ID NO: 798 - RNA, 20 nt, synthetic construct
  misc_feature 1..20: note = Synthetic
  source 1..20: mol_type = other RNA
taagagagtgggcgctctcg

SEQ ID NO: 799 - RNA, 20 nt, synthetic construct
  misc_feature 1..20: note = Synthetic
  source 1..20: mol_type = other RNA
tcgagccctaccatccacgc

SEQ ID NO: 800 - RNA, 20 nt, synthetic construct
  misc_feature 1..20: note = Synthetic
  source 1..20: mol_type = other RNA
tcgcggccgctgacggtagg

SEQ ID NO: 801 - RNA, 20 nt, synthetic construct
  misc_feature 1..20: note = Synthetic
  source 1..20: mol_type = other RNA
tgctgcccggcgtggatggt

SEQ ID NO: 802 - RNA, 20 nt, synthetic construct
  misc_feature 1..20: note = Synthetic
  source 1..20: mol_type = other RNA
tggagggagcgcgcgctgcc

SEQ ID NO: 803 - RNA, 20 nt, synthetic construct
  misc_feature 1..20: note = Synthetic
  source 1..20: mol_type = other RNA
tggtgcgacgaagccgctgg

SEQ ID NO: 804 - RNA, 20 nt, synthetic construct
  misc_feature 1..20: note = Synthetic
  source 1..20: mol_type = other RNA
ttcggtttgcgcgagcgggc

SEQ ID NO: 805 - RNA, 20 nt, synthetic construct
  misc_feature 1..20: note = Synthetic
  source 1..20: mol_type = other RNA
tttccccccaccgcaagagg

SEQ ID NO: 806 - RNA, 22 nt, synthetic construct
  misc_feature 1..22: note = Synthetic
  source 1..22: mol_type = other RNA
gtccagggcaggcctccggggg

SEQ ID NO: 807 - RNA, 22 nt, synthetic construct
  misc_feature 1..22: note = Synthetic
  source 1..22: mol_type = other RNA
accgcaagaggaggcagggtct

SEQ ID NO: 808 - RNA, 22 nt, synthetic construct
  misc_feature 1..22: note = Synthetic
  source 1..22: mol_type = other RNA
agcgaggggctgctcagacgct

SEQ ID NO: 809 - RNA, 22 nt, synthetic construct
  misc_feature 1..22: note = Synthetic
  source 1..22: mol_type = other RNA
aggaaagcgtgcgtgcggctaa

SEQ ID NO: 810 - RNA, 22 nt, synthetic construct
  misc_feature 1..22: note = Synthetic
  source 1..22: mol_type = other RNA
agtccgctggctgctgcccggc

SEQ ID NO: 811 - RNA, 22 nt, synthetic construct
  misc_feature 1..22: note = Synthetic
  source 1..22: mol_type = other RNA
atgagaggagcgccccagtggc

SEQ ID NO: 812 - RNA, 22 nt, synthetic construct
  misc_feature 1..22: note = Synthetic
  source 1..22: mol_type = other RNA
ccctggagggagcgcgcgctgc

SEQ ID NO: 813 - RNA, 22 nt, synthetic construct
  misc_feature 1..22: note = Synthetic
  source 1..22: mol_type = other RNA
cgctcgcgcaaaccgaaaggcc

SEQ ID NO: 814 - RNA, 22 nt, synthetic construct
  misc_feature 1..22: note = Synthetic
  source 1..22: mol_type = other RNA
cgtcgcaccaaacaggcgacca

SEQ ID NO: 815 - RNA, 22 nt, synthetic construct
  misc_feature 1..22: note = Synthetic
  source 1..22: mol_type = other RNA
ctgacggtaggtggaatcgcgt

SEQ ID NO: 816 - RNA, 22 nt, synthetic construct
  misc_feature 1..22: note = Synthetic
  source 1..22: mol_type = other RNA
tctcgcggccgctgacggtagg

SEQ ID NO: 817 - RNA, 22 nt, synthetic construct
  misc_feature 1..22: note = Synthetic
  source 1..22: mol_type = other RNA
tgcccggcgtggatggtagggc

SEQ ID NO: 818 - RNA, 22 nt, synthetic construct
  misc_feature 1..22: note = Synthetic
  source 1..22: mol_type = other RNA
ttccccccaccgcaagaggagg

SEQ ID NO: 819 - RNA, 20 nt, synthetic construct
  misc_feature 1..20: note = Synthetic
  source 1..20: mol_type = other RNA
gagttctttcgaggggcaga

SEQ ID NO: 820 - RNA, 20 nt, synthetic construct
  misc_feature 1..20: note = Synthetic
  source 1..20: mol_type = other RNA
gccgcgcgctgcctcgccat

SEQ ID NO: 821 - RNA, 20 nt, synthetic construct
  misc_feature 1..20: note = Synthetic
  source 1..20: mol_type = other RNA
gcgccgccgatcccagagtc

SEQ ID NO: 822 - RNA, 20 nt, synthetic construct
  misc_feature 1..20: note = Synthetic
  source 1..20: mol_type = other RNA
gcgcggcttcccggaagtgg

SEQ ID NO: 823 - RNA, 20 nt, synthetic construct
  misc_feature 1..20: note = Synthetic
  source 1..20: mol_type = other RNA
gcgctatgagttctttcgag

SEQ ID NO: 824 - RNA, 20 nt, synthetic construct
  misc_feature 1..20: note = Synthetic
  source 1..20: mol_type = other RNA
gcgggcgcctagaacccgac

SEQ ID NO: 825 - RNA, 20 nt, synthetic construct
  misc_feature 1..20: note = Synthetic
  source 1..20: mol_type = other RNA
gcttcccggaagtggcggcg

SEQ ID NO: 826 - RNA, 20 nt, synthetic construct
  misc_feature 1..20: note = Synthetic
  source 1..20: mol_type = other RNA
gcttcgatagggagaacctg

SEQ ID NO: 827 - RNA, 20 nt, synthetic construct
  misc_feature 1..20: note = Synthetic
  source 1..20: mol_type = other RNA
ggaagtaggcgcgggccctc

SEQ ID NO: 828 - RNA, 20 nt, synthetic construct
  misc_feature 1..20: note = Synthetic
  source 1..20: mol_type = other RNA
ggagaccgggggcaaagtca

SEQ ID NO: 829 - RNA, 20 nt, synthetic construct
  misc_feature 1..20: note = Synthetic
  source 1..20: mol_type = other RNA
ggagcatccggtcgggttct

SEQ ID NO: 830 - RNA, 20 nt, synthetic construct
  misc_feature 1..20: note = Synthetic
  source 1..20: mol_type = other RNA
ggcgcggtcagggctggcct

SEQ ID NO: 831 - RNA, 20 nt, synthetic construct
  misc_feature 1..20: note = Synthetic
  source 1..20: mol_type = other RNA
ggcgctatgagttctttcga

SEQ ID NO: 832 - RNA, 20 nt, synthetic construct
  misc_feature 1..20: note = Synthetic
  source 1..20: mol_type = other RNA
ggctgcgttcggccgcccaa

SEQ ID NO: 833 - RNA, 20 nt, synthetic construct
  misc_feature 1..20: note = Synthetic
  source 1..20: mol_type = other RNA
gggcaaagtcaaggagcatc

SEQ ID NO: 834 - RNA, 20 nt, synthetic construct
  misc_feature 1..20: note = Synthetic
  source 1..20: mol_type = other RNA
ggggtcccggactctgggat

SEQ ID NO: 835 - RNA, 20 nt, synthetic construct
  misc_feature 1..20: note = Synthetic
  source 1..20: mol_type = other RNA
ggtctccggactcctctgat

SEQ ID NO: 836 - RNA, 20 nt, synthetic construct
  misc_feature 1..20: note = Synthetic
  source 1..20: mol_type = other RNA
ggttttggggtcccggactc

SEQ ID NO: 837 - RNA, 20 nt, synthetic construct
  misc_feature 1..20: note = Synthetic
  source 1..20: mol_type = other RNA
gtcccggactctgggatcgg

SEQ ID NO: 838 - RNA, 20 nt, synthetic construct
  misc_feature 1..20: note = Synthetic
  source 1..20: mol_type = other RNA
gttttggggtcccggactct

SEQ ID NO: 839 - RNA, 20 nt, synthetic construct
  misc_feature 1..20: note = Synthetic
  source 1..20: mol_type = other RNA
aagcggtctatggagatagt

SEQ ID NO: 840 - RNA, 20 nt, synthetic construct
  misc_feature 1..20: note = Synthetic
  source 1..20: mol_type = other RNA
acgcagccacgtccaatcag

SEQ ID NO: 841 - RNA, 20 nt, synthetic construct
  misc_feature 1..20: note = Synthetic
  source 1..20: mol_type = other RNA
agcgcgcggcttcccggaag

SEQ ID NO: 842 - RNA, 20 nt, synthetic construct
  misc_feature 1..20: note = Synthetic
  source 1..20: mol_type = other RNA
atcagaggagtccggagacc

SEQ ID NO: 843 - RNA, 20 nt, synthetic construct
  misc_feature 1..20: note = Synthetic
  source 1..20: mol_type = other RNA
cacgtccaatcagaggagtc

SEQ ID NO: 844 - RNA, 20 nt, synthetic construct
  misc_feature 1..20: note = Synthetic
  source 1..20: mol_type = other RNA
cccaatggcgaggcagcgcg

SEQ ID NO: 845 - RNA, 20 nt, synthetic construct
  misc_feature 1..20: note = Synthetic
  source 1..20: mol_type = other RNA
ccgcgcgctgcctcgccatt

SEQ ID NO: 846 - RNA, 20 nt, synthetic construct
  misc_feature 1..20: note = Synthetic
  source 1..20: mol_type = other RNA
cctgaccgcgccgccacttc

SEQ ID NO: 847 - RNA, 20 nt, synthetic construct
  misc_feature 1..20: note = Synthetic
  source 1..20: mol_type = other RNA
cgccgccgatcccagagtcc

SEQ ID NO: 848 - RNA, 20 nt, synthetic construct
  misc_feature 1..20: note = Synthetic
  source 1..20: mol_type = other RNA
cggaagtggcggcgcggtca

SEQ ID NO: 849 - RNA, 20 nt, synthetic construct
  misc_feature 1..20: note = Synthetic
  source 1..20: mol_type = other RNA
cggactcctctgattggacg

SEQ ID NO: 850 - RNA, 20 nt, synthetic construct
  misc_feature 1..20: note = Synthetic
  source 1..20: mol_type = other RNA
cggcgctatgagttctttcg

SEQ ID NO: 851 - RNA, 20 nt, synthetic construct
  misc_feature 1..20: note = Synthetic
  source 1..20: mol_type = other RNA
cgttcggccgcccaatggcg

SEQ ID NO: 852 - RNA, 20 nt, synthetic construct
  misc_feature 1..20: note = Synthetic
  source 1..20: mol_type = other RNA
ctccatagaccgcttcgata

SEQ ID NO: 853 - RNA, 20 nt, synthetic construct
  misc_feature 1..20: note = Synthetic
  source 1..20: mol_type = other RNA
ctccctatcgaagcggtcta

SEQ ID NO: 854 - RNA, 20 nt, synthetic construct
  misc_feature 1..20: note = Synthetic
  source 1..20: mol_type = other RNA
ctgaccgcgccgccacttcc

SEQ ID NO: 855 - RNA, 20 nt, synthetic construct
  misc_feature 1..20: note = Synthetic
  source 1..20: mol_type = other RNA
cttcgatagggagaacctga

SEQ ID NO: 856 - RNA, 20 nt, synthetic construct
  misc_feature 1..20: note = Synthetic
  source 1..20: mol_type = other RNA
tcagaggagtccggagaccg

SEQ ID NO: 857 - RNA, 20 nt, synthetic construct
  misc_feature 1..20: note = Synthetic
  source 1..20: mol_type = other RNA
tctccatagaccgcttcgat

SEQ ID NO: 858 - RNA, 20 nt, synthetic construct
  misc_feature 1..20: note = Synthetic
  source 1..20: mol_type = other RNA
tgattggacgtggctgcgtt

SEQ ID NO: 859 - RNA, 22 nt, synthetic construct
  misc_feature 1..22: note = Synthetic
  source 1..22: mol_type = other RNA
gaacgcagccacgtccaatcag

SEQ ID NO: 860 - RNA, 22 nt, synthetic construct
  misc_feature 1..22: note = Synthetic
  source 1..22: mol_type = other RNA
gaactcatagcgccgccgatcc

SEQ ID NO: 861 - RNA, 22 nt, synthetic construct
  misc_feature 1..22: note = Synthetic
  source 1..22: mol_type = other RNA
gcagcgggcgcctagaacccga

SEQ ID NO: 862 - RNA, 22 nt, synthetic construct
  misc_feature 1..22: note = Synthetic
  source 1..22: mol_type = other RNA
gccttggcttcagctgcggttt

SEQ ID NO: 863 - RNA, 22 nt, synthetic construct
  misc_feature 1..22: note = Synthetic
  source 1..22: mol_type = other RNA
gcggttttggggtcccggactc

SEQ ID NO: 864 - RNA, 22 nt, synthetic construct
  misc_feature 1..22: note = Synthetic
  source 1..22: mol_type = other RNA
ggactctgggatcggcggcgct

SEQ ID NO: 865 - RNA, 22 nt, synthetic construct
  misc_feature 1..22: note = Synthetic
  source 1..22: mol_type = other RNA
ggcaaagtcaaggagcatccgg

SEQ ID NO: 866 - RNA, 22 nt, synthetic construct
  misc_feature 1..22: note = Synthetic
  source 1..22: mol_type = other RNA
agttctttcgaggggcagatgg

SEQ ID NO: 867 - RNA, 22 nt, synthetic construct
  misc_feature 1..22: note = Synthetic
  source 1..22: mol_type = other RNA
tcgaagcggtctatggagatag

SEQ ID NO: 868 - RNA, 20 nt, synthetic construct
  misc_feature 1..20: note = Synthetic
  source 1..20: mol_type = other RNA
gacggttgggatgcctgaca

SEQ ID NO: 869 - RNA, 20 nt, synthetic construct
  misc_feature 1..20: note = Synthetic
  source 1..20: mol_type = other RNA
gaggcgcagcagtgccacag

SEQ ID NO: 870 - RNA, 20 nt, synthetic construct
  misc_feature 1..20: note = Synthetic
  source 1..20: mol_type = other RNA
gcccacccaggcctgacttc

SEQ ID NO: 871 - RNA, 20 nt, synthetic construct
  misc_feature 1..20: note = Synthetic
  source 1..20: mol_type = other RNA
gcctcgggtgtcttttgcgg

SEQ ID NO: 872 - RNA, 20 nt, synthetic construct
  misc_feature 1..20: note = Synthetic
  source 1..20: mol_type = other RNA
gcgaaaggaaattccttgtc

SEQ ID NO: 873 - RNA, 20 nt, synthetic construct
  misc_feature 1..20: note = Synthetic
  source 1..20: mol_type = other RNA
gctgcgcctctgctgcgcct

SEQ ID NO: 874 - RNA, 20 nt, synthetic construct
  misc_feature 1..20: note = Synthetic
  source 1..20: mol_type = other RNA
gctgcgggtatttctcagtg

SEQ ID NO: 875 - RNA, 20 nt, synthetic construct
  misc_feature 1..20: note = Synthetic
  source 1..20: mol_type = other RNA
gtatttctcagtgtggcgaa

SEQ ID NO: 876 - RNA, 20 nt, synthetic construct
  misc_feature 1..20: note = Synthetic
  source 1..20: mol_type = other RNA
gtgtgctgcgtgtcgcgtca

SEQ ID NO: 877 - RNA, 20 nt, synthetic construct
  misc_feature 1..20: note = Synthetic
  source 1..20: mol_type = other RNA
acacgcaccacccggaagtc

SEQ ID NO: 878 - RNA, 20 nt, synthetic construct
  misc_feature 1..20: note = Synthetic
  source 1..20: mol_type = other RNA
acactgagaaatacccgcag

SEQ ID NO: 879 - RNA, 20 nt, synthetic construct
  misc_feature 1..20: note = Synthetic
  source 1..20: mol_type = other RNA
accacccggaagtcaggcct

SEQ ID NO: 880 - RNA, 20 nt, synthetic construct
  misc_feature 1..20: note = Synthetic
  source 1..20: mol_type = other RNA
acccaggcctgacttccggg

SEQ ID NO: 881 - RNA, 20 nt, synthetic construct
  misc_feature 1..20: note = Synthetic
  source 1..20: mol_type = other RNA
accgccgcaaaagacacccg

SEQ ID NO: 882 - RNA, 20 nt, synthetic construct
  misc_feature 1..20: note = Synthetic
  source 1..20: mol_type = other RNA
acggcgtcacgtggccagcg

SEQ ID NO: 883 - RNA, 20 nt, synthetic construct
  misc_feature 1..20: note = Synthetic
  source 1..20: mol_type = other RNA
acgtggccagcgcgggcttg

SEQ ID NO: 884 - RNA, 20 nt, synthetic construct
  misc_feature 1..20: note = Synthetic
  source 1..20: mol_type = other RNA
atacccgcagcggcccaccc

SEQ ID NO: 885 - RNA, 20 nt, synthetic construct
  misc_feature 1..20: note = Synthetic
  source 1..20: mol_type = other RNA
caccacccggaagtcaggcc

SEQ ID NO: 886 - RNA, 20 nt, synthetic construct
  misc_feature 1..20: note = Synthetic
  source 1..20: mol_type = other RNA
cccggaagtcaggcctgggt

SEQ ID NO: 887 - RNA, 20 nt, synthetic construct
  misc_feature 1..20: note = Synthetic
  source 1..20: mol_type = other RNA
cgcgagcttctgaaactagg

SEQ ID NO: 888 - RNA, 20 nt, synthetic construct
  misc_feature 1..20: note = Synthetic
  source 1..20: mol_type = other RNA
cggcagaggcggagccgctg

SEQ ID NO: 889 - RNA, 20 nt, synthetic construct
  misc_feature 1..20: note = Synthetic
  source 1..20: mol_type = other RNA
cggcgtcacgtggccagcgc

SEQ ID NO: 890 - RNA, 20 nt, synthetic construct
  misc_feature 1..20: note = Synthetic
  source 1..20: mol_type = other RNA
cgggtgtcttttgcggcggt

SEQ ID NO: 891 - RNA, 20 nt, synthetic construct
  misc_feature 1..20: note = Synthetic
  source 1..20: mol_type = other RNA
ctcgcgccacaagcccgcgc

SEQ ID NO: 892 - RNA, 20 nt, synthetic construct
  misc_feature 1..20: note = Synthetic
  source 1..20: mol_type = other RNA
cttctgaaactaggcggcag

SEQ ID NO: 893 - RNA, 20 nt, synthetic construct
  misc_feature 1..20: note = Synthetic
  source 1..20: mol_type = other RNA
tcgggtgtcttttgcggcgg

SEQ ID NO: 894 - RNA, 20 nt, synthetic construct
  misc_feature 1..20: note = Synthetic
  source 1..20: mol_type = other RNA
tgcgcctcgggtgtcttttg

SEQ ID NO: 895 - RNA, 20 nt, synthetic construct
  misc_feature 1..20: note = Synthetic
  source 1..20: mol_type = other RNA
tggcgcgagcttctgaaact

SEQ ID NO: 896 - RNA, 20 nt, synthetic construct
  misc_feature 1..20: note = Synthetic
  source 1..20: mol_type = other RNA
tgtcgcgtcacggcgtcacg

SEQ ID NO: 897 - RNA, 22 nt, synthetic construct
  misc_feature 1..22: note = Synthetic
  source 1..22: mol_type = other RNA
gcctcgggtgtcttttgcggcg

SEQ ID NO: 898 - RNA, 22 nt, synthetic construct
  misc_feature 1..22: note = Synthetic
  source 1..22: mol_type = other RNA
gcggcccacccaggcctgactt

SEQ ID NO: 899 - RNA, 22 nt, synthetic construct
  misc_feature 1..22: note = Synthetic
  source 1..22: mol_type = other RNA
acgcaccacccggaagtcaggc

SEQ ID NO: 900 - RNA, 22 nt, synthetic construct
  misc_feature 1..22: note = Synthetic
  source 1..22: mol_type = other RNA
actgctgcgcctctgctgcgcc

SEQ ID NO: 901 - RNA, 22 nt, synthetic construct
  misc_feature 1..22: note = Synthetic
  source 1..22: mol_type = other RNA
agtcaggcctgggtgggccgct

SEQ ID NO: 902 - RNA, 22 nt, synthetic construct
  misc_feature 1..22: note = Synthetic
  source 1..22: mol_type = other RNA
ctgacggttgggatgcctgaca

SEQ ID NO: 903 - RNA, 20 nt, synthetic construct
  misc_feature 1..20: note = Synthetic
  source 1..20: mol_type = other RNA
gaagcgccgcactctcctta

SEQ ID NO: 904 - RNA, 20 nt, synthetic construct
  misc_feature 1..20: note = Synthetic
  source 1..20: mol_type = other RNA
gaaggcggatccgggaggcg

SEQ ID NO: 905 - RNA, 20 nt, synthetic construct
  misc_feature 1..20: note = Synthetic
  source 1..20: mol_type = other RNA
gagaaggcggatccgggagg

SEQ ID NO: 906 - RNA, 20 nt, synthetic construct
  misc_feature 1..20: note = Synthetic
  source 1..20: mol_type = other RNA
gcagggcggaagcggggaga

SEQ ID NO: 907 - RNA, 20 nt, synthetic construct
  misc_feature 1..20: note = Synthetic
  source 1..20: mol_type = other RNA
gccgcactctccttagggct

SEQ ID NO: 908 - RNA, 20 nt, synthetic construct
  misc_feature 1..20: note = Synthetic
  source 1..20: mol_type = other RNA
gcgggaattctgaaagccgc

SEQ ID NO: 909 - RNA, 20 nt, synthetic construct
  misc_feature 1..20: note = Synthetic
  source 1..20: mol_type = other RNA
gctgggaactgcaactcatc

SEQ ID NO: 910 - RNA, 20 nt, synthetic construct
  misc_feature 1..20: note = Synthetic
  source 1..20: mol_type = other RNA
gcttcccgaggcgtgcagct

SEQ ID NO: 911 - RNA, 20 nt, synthetic construct
  misc_feature 1..20: note = Synthetic
  source 1..20: mol_type = other RNA
ggaagcgccgcactctcctt

SEQ ID NO: 912 - RNA, 20 nt, synthetic construct
  misc_feature 1..20: note = Synthetic
  source 1..20: mol_type = other RNA
ggaattctgaaagccgctgg

SEQ ID NO: 913 - RNA, 20 nt, synthetic construct
  misc_feature 1..20: note = Synthetic
  source 1..20: mol_type = other RNA
ggagagtgcggcgcttcccg

SEQ ID NO: 914 - RNA, 20 nt, synthetic construct
  misc_feature 1..20: note = Synthetic
  source 1..20: mol_type = other RNA
ggcagtctgtaaactcgcgc

SEQ ID NO: 915 - RNA, 20 nt, synthetic construct
  misc_feature 1..20: note = Synthetic
  source 1..20: mol_type = other RNA
gggatacgttacgtcgacgc

SEQ ID NO: 916 - RNA, 20 nt, synthetic construct
  misc_feature 1..20: note = Synthetic
  source 1..20: mol_type = other RNA
gggcggaagcggggagaagg

SEQ ID NO: 917 - RNA, 20 nt, synthetic construct
  misc_feature 1..20: note = Synthetic
  source 1..20: mol_type = other RNA
gggcgtgaccctgggcgaga

SEQ ID NO: 918 - RNA, 20 nt, synthetic construct
  misc_feature 1..20: note = Synthetic
  source 1..20: mol_type = other RNA
ggggagaaggcggatccggg

SEQ ID NO: 919 - RNA, 20 nt, synthetic construct
  misc_feature 1..20: note = Synthetic
  source 1..20: mol_type = other RNA
ggggatacgttacgtcgacg

SEQ ID NO: 920 - RNA, 20 nt, synthetic construct
  misc_feature 1..20: note = Synthetic
  source 1..20: mol_type = other RNA
gtcgacgcgggcgtgaccct

SEQ ID NO: 921 - RNA, 20 nt, synthetic construct
  misc_feature 1..20: note = Synthetic
  source 1..20: mol_type = other RNA
gttagcgcgcagggcggaag

SEQ ID NO: 922 - RNA, 20 nt, synthetic construct
  misc_feature 1..20: note = Synthetic
  source 1..20: mol_type = other RNA
aagcggggagaaggcggatc

SEQ ID NO: 923 - RNA, 20 nt, synthetic construct
  misc_feature 1..20: note = Synthetic
  source 1..20: mol_type = other RNA
aagctctcgagctcccgtct

SEQ ID NO: 924 - RNA, 20 nt, synthetic construct
  misc_feature 1..20: note = Synthetic
  source 1..20: mol_type = other RNA
agctctcgagctcccgtctt

SEQ ID NO: 925 - RNA, 20 nt, synthetic construct
  misc_feature 1..20: note = Synthetic
  source 1..20: mol_type = other RNA
agttcccagctgcacgcctc

SEQ ID NO: 926 - RNA, 20 nt, synthetic construct
  misc_feature 1..20: note = Synthetic
  source 1..20: mol_type = other RNA
cccgtcttgggttagcgcgc

SEQ ID NO: 927 - RNA, 20 nt, synthetic construct
  misc_feature 1..20: note = Synthetic
  source 1..20: mol_type = other RNA
ccctgcgcgctaacccaaga

SEQ ID NO: 928 - RNA, 20 nt, synthetic construct
  misc_feature 1..20: note = Synthetic
  source 1..20: mol_type = other RNA
ccgccaaaccctctcgccca

SEQ ID NO: 929 - RNA, 20 nt, synthetic construct
  misc_feature 1..20: note = Synthetic
  source 1..20: mol_type = other RNA
ccgtcttgggttagcgcgca

SEQ ID NO: 930 - RNA, 20 nt, synthetic construct
  misc_feature 1..20: note = Synthetic
  source 1..20: mol_type = other RNA
cctgcgcgctaacccaagac

SEQ ID NO: 931 - RNA, 20 nt, synthetic construct
  misc_feature 1..20: note = Synthetic
  source 1..20: mol_type = other RNA
cgctgcgcgcggtccgccag

SEQ ID NO: 932 - RNA, 20 nt, synthetic construct
  misc_feature 1..20: note = Synthetic
  source 1..20: mol_type = other RNA
cgctggcggaccgcgcgcag

SEQ ID NO: 933 - RNA, 20 nt, synthetic construct
  misc_feature 1..20: note = Synthetic
  source 1..20: mol_type = other RNA
cgggcgtgaccctgggcgag

SEQ ID NO: 934 - RNA, 20 nt, synthetic construct
  misc_feature 1..20: note = Synthetic
  source 1..20: mol_type = other RNA
cggtctctggccgctgcgcg

SEQ ID NO: 935 - RNA, 20 nt, synthetic construct
  misc_feature 1..20: note = Synthetic
  source 1..20: mol_type = other RNA
cgtaacgtatccccgcctcc

SEQ ID NO: 936 - RNA, 20 nt, synthetic construct
  misc_feature 1..20: note = Synthetic
  source 1..20: mol_type = other RNA
cgtcgacgcgggcgtgaccc

SEQ ID NO: 937 - RNA, 20 nt, synthetic construct
  misc_feature 1..20: note = Synthetic
  source 1..20: mol_type = other RNA
tagcgcgcagggcggaagcg

SEQ ID NO: 938 - RNA, 20 nt, synthetic construct
  misc_feature 1..20: note = Synthetic
  source 1..20: mol_type = other RNA
tcatctgggttgtgcgcaga

SEQ ID NO: 939 - RNA, 20 nt, synthetic construct
  misc_feature 1..20: note = Synthetic
  source 1..20: mol_type = other RNA
tcttgggttagcgcgcaggg

SEQ ID NO: 940 - RNA, 20 nt, synthetic construct
  misc_feature 1..20: note = Synthetic
  source 1..20: mol_type = other RNA
tgggttgtgcgcagaaggct

SEQ ID NO: 941 - RNA, 20 nt, synthetic construct
  misc_feature 1..20: note = Synthetic
  source 1..20: mol_type = other RNA
ttagcgcgcagggcggaagc

SEQ ID NO: 942 - RNA, 22 nt, synthetic construct
  misc_feature 1..22: note = Synthetic
  source 1..22: mol_type = other RNA
gagctcgagagcttgatcctgc

SEQ ID NO: 943 - RNA, 22 nt, synthetic construct
  misc_feature 1..22: note = Synthetic
  source 1..22: mol_type = other RNA
gagggcagtctgtaaactcgcg

SEQ ID NO: 944 - RNA, 22 nt, synthetic construct
  misc_feature 1..22: note = Synthetic
  source 1..22: mol_type = other RNA
gcagctgggaactgcaactcat

SEQ ID NO: 945 - RNA, 22 nt, synthetic construct
  misc_feature 1..22: note = Synthetic
  source 1..22: mol_type = other RNA
gcagggcggaagcggggagaag

SEQ ID NO: 946 - RNA, 22 nt, synthetic construct
  misc_feature 1..22: note = Synthetic
  source 1..22: mol_type = other RNA
ggagaaggcggatccgggaggc

SEQ ID NO: 947 - RNA, 22 nt, synthetic construct
  misc_feature 1..22: note = Synthetic
  source 1..22: mol_type = other RNA
accctgggcgagagggtttggc

SEQ ID NO: 948 - RNA, 22 nt, synthetic construct
  misc_feature 1..22: note = Synthetic
  source 1..22: mol_type = other RNA
acgcgggcgtgaccctgggcga

SEQ ID NO: 949 - RNA, 22 nt, synthetic construct
  misc_feature 1..22: note = Synthetic
  source 1..22: mol_type = other RNA
atcaagctctcgagctcccgtc

SEQ ID NO: 950 - RNA, 22 nt, synthetic construct
  misc_feature 1..22: note = Synthetic
  source 1..22: mol_type = other RNA
attcccgccaaaccctctcgcc

SEQ ID NO: 951 - RNA, 22 nt, synthetic construct
  misc_feature 1..22: note = Synthetic
  source 1..22: mol_type = other RNA
cagccttctgcgcacaacccag

SEQ ID NO: 952 - RNA, 22 nt, synthetic construct
  misc_feature 1..22: note = Synthetic
  source 1..22: mol_type = other RNA
cgacgtaacgtatccccgcctc

SEQ ID NO: 953 - RNA, 22 nt, synthetic construct
  misc_feature 1..22: note = Synthetic
  source 1..22: mol_type = other RNA
cgcgcggtccgccagcggcttt

SEQ ID NO: 954 - RNA, 22 nt, synthetic construct
  misc_feature 1..22: note = Synthetic
  source 1..22: mol_type = other RNA
cggccagagaccgagccctaag

SEQ ID NO: 955 - RNA, 20 nt, synthetic construct
  misc_feature 1..20: note = Synthetic
  source 1..20: mol_type = other RNA
gaaggatgaggtagagtatg

SEQ ID NO: 956 - RNA, 20 nt, synthetic construct
  misc_feature 1..20: note = Synthetic
  source 1..20: mol_type = other RNA
gacatggggtgagagggcgg

SEQ ID NO: 957 - RNA, 20 nt, synthetic construct
  misc_feature 1..20: note = Synthetic
  source 1..20: mol_type = other RNA
gacgccggcgccggcgcgcc

SEQ ID NO: 958 - RNA, 20 nt, synthetic construct
  misc_feature 1..20: note = Synthetic
  source 1..20: mol_type = other RNA
gacgtccgaaccctgctttc

SEQ ID NO: 959 - RNA, 20 nt, synthetic construct
  misc_feature 1..20: note = Synthetic
  source 1..20: mol_type = other RNA
gaggtagagtatggggtccg

SEQ ID NO: 960 - RNA, 20 nt, synthetic construct
  misc_feature 1..20: note = Synthetic
  source 1..20: mol_type = other RNA
gagtatggggtccgaggggc

SEQ ID NO: 961 - RNA, 20 nt, synthetic construct
  misc_feature 1..20: note = Synthetic
  source 1..20: mol_type = other RNA
gcgctcttcccgctctggag

SEQ ID NO: 962 - RNA, 20 nt, synthetic construct
  misc_feature 1..20: note = Synthetic
  source 1..20: mol_type = other RNA
gcggggttgtgtgtggcgga

SEQ ID NO: 963 - RNA, 20 nt, synthetic construct
  misc_feature 1..20: note = Synthetic
  source 1..20: mol_type = other RNA
ggaggaaacgctcgttgcta

SEQ ID NO: 964 - RNA, 20 nt, synthetic construct
  misc_feature 1..20: note = Synthetic
  source 1..20: mol_type = other RNA
ggctagagcggggttgtgtg

SEQ ID NO: 965 - RNA, 20 nt, synthetic construct
  misc_feature 1..20: note = Synthetic
  source 1..20: mol_type = other RNA
ggctcccagaaagcagggtt

SEQ ID NO: 966 - RNA, 20 nt, synthetic construct
  misc_feature 1..20: note = Synthetic
  source 1..20: mol_type = other RNA
ggctcgggcctttcaaaccc

SEQ ID NO: 967 - RNA, 20 nt, synthetic construct
  misc_feature 1..20: note = Synthetic
  source 1..20: mol_type = other RNA
ggcttgcgcagtgtcgacgc

SEQ ID NO: 968 - RNA, 20 nt, synthetic construct
  misc_feature 1..20: note = Synthetic
  source 1..20: mol_type = other RNA
gggcggggtgcgccctgcgc

SEQ ID NO: 969 - RNA, 20 nt, synthetic construct
  misc_feature 1..20: note = Synthetic
  source 1..20: mol_type = other RNA
gggttgtgtgtggcggaggg

SEQ ID NO: 970 - RNA, 20 nt, synthetic construct
  misc_feature 1..20: note = Synthetic
  source 1..20: mol_type = other RNA
ggtagagtatggggtccgag

SEQ ID NO: 971 - RNA, 20 nt, synthetic construct
  misc_feature 1..20: note = Synthetic
  source 1..20: mol_type = other RNA
ggtccgaggggcagggagag

SEQ ID NO: 972 - RNA, 20 nt, synthetic construct
  misc_feature 1..20: note = Synthetic
  source 1..20: mol_type = other RNA
gtccgaggggcagggagagt

SEQ ID NO: 973 - RNA, 20 nt, synthetic construct
  misc_feature 1..20: note = Synthetic
  source 1..20: mol_type = other RNA
gtgcgcaagcgcgcgaggct

SEQ ID NO: 974 - RNA, 20 nt, synthetic construct
  misc_feature 1..20: note = Synthetic
  source 1..20: mol_type = other RNA
gtgggcttcgcctggccaga

SEQ ID NO: 975 - RNA, 20 nt, synthetic construct
  misc_feature 1..20: note = Synthetic
  source 1..20: mol_type = other RNA
aagcagggttcggacgtcat

SEQ ID NO: 976 - RNA, 20 nt, synthetic construct
  misc_feature 1..20: note = Synthetic
  source 1..20: mol_type = other RNA
acatggcggaggcggatctc

SEQ ID NO: 977 - RNA, 20 nt, synthetic construct
  misc_feature 1..20: note = Synthetic
  source 1..20: mol_type = other RNA
acgcagcgctcttcccgctc

SEQ ID NO: 978 - RNA, 20 nt, synthetic construct
  misc_feature 1..20: note = Synthetic
  source 1..20: mol_type = other RNA
acgtccgaaccctgctttct

SEQ ID NO: 979 - RNA, 20 nt, synthetic construct
  misc_feature 1..20: note = Synthetic
  source 1..20: mol_type = other RNA
actccatcgtgcaatgagaa

SEQ ID NO: 980 - RNA, 20 nt, synthetic construct
  misc_feature 1..20: note = Synthetic
  source 1..20: mol_type = other RNA
agcagggttcggacgtcatt

SEQ ID NO: 981 - RNA, 20 nt, synthetic construct
  misc_feature 1..20: note = Synthetic
  source 1..20: mol_type = other RNA
agggttcggacgtcattggg

SEQ ID NO: 982 - RNA, 20 nt, synthetic construct
  misc_feature 1..20: note = Synthetic
  source 1..20: mol_type = other RNA
cagtcgcgcctctccagagc

SEQ ID NO: 983 - RNA, 20 nt, synthetic construct
  misc_feature 1..20: note = Synthetic
  source 1..20: mol_type = other RNA
ccgctctggagaggcgcgac

SEQ ID NO: 984 - RNA, 20 nt, synthetic construct
  misc_feature 1..20: note = Synthetic
  source 1..20: mol_type = other RNA
ccggcgcgccggggtttgaa

SEQ ID NO: 985 - RNA, 20 nt, synthetic construct
  misc_feature 1..20: note = Synthetic
  source 1..20: mol_type = other RNA
cctttcaaaccccggcgcgc

SEQ ID NO: 986 - RNA, 20 nt, synthetic construct
  misc_feature 1..20: note = Synthetic
  source 1..20: mol_type = other RNA
cgacctccgggattggtgtc

SEQ ID NO: 987 - RNA, 20 nt, synthetic construct
  misc_feature 1..20: note = Synthetic
  source 1..20: mol_type = other RNA
cgctctggagaggcgcgact

SEQ ID NO: 988 - RNA, 20 nt, synthetic construct
  misc_feature 1..20: note = Synthetic
  source 1..20: mol_type = other RNA
ctccggcatgtcaacgtcgt

SEQ ID NO: 989 - RNA, 20 nt, synthetic construct
  misc_feature 1..20: note = Synthetic
  source 1..20: mol_type = other RNA
tcaacgtcgtgggcttcgcc

SEQ ID NO: 990 - RNA, 20 nt, synthetic construct
  misc_feature 1..20: note = Synthetic
  source 1..20: mol_type = other RNA
tcggacgtcattgggaggcg

SEQ ID NO: 991 - RNA, 20 nt, synthetic construct
  misc_feature 1..20: note = Synthetic
  source 1..20: mol_type = other RNA
tctccggcatgtcaacgtcg

SEQ ID NO: 992 - RNA, 20 nt, synthetic construct
  misc_feature 1..20: note = Synthetic
  source 1..20: mol_type = other RNA
tgcgcaagcgcgcgaggctc

SEQ ID NO: 993 - RNA, 20 nt, synthetic construct
  misc_feature 1..20: note = Synthetic
  source 1..20: mol_type = other RNA
tgcgcactttagccagcgca

SEQ ID NO: 994 - RNA, 20 nt, synthetic construct
  misc_feature 1..20: note = Synthetic
  source 1..20: mol_type = other RNA
ttgcgcactttagccagcgc

SEQ ID NO: 995 - RNA, 22 nt, synthetic construct
  misc_feature 1..22: note = Synthetic
  source 1..22: mol_type = other RNA
gacagggtcttgctctctcacc

SEQ ID NO: 996 - RNA, 22 nt, synthetic construct
  misc_feature 1..22: note = Synthetic
  source 1..22: mol_type = other RNA
gatcgtgccactgcactccatc

SEQ ID NO: 997 - RNA, 22 nt, synthetic construct
  misc_feature 1..22: note = Synthetic
  source 1..22: mol_type = other RNA
gccagaaggatgaggtagagta

SEQ ID NO: 998 - RNA, 22 nt, synthetic construct
  misc_feature 1..22: note = Synthetic
  source 1..22: mol_type = other RNA
gcctagcaacagaagcgacctc

SEQ ID NO: 999 - RNA, 22 nt, synthetic construct
  misc_feature 1..22: note = Synthetic
  source 1..22: mol_type = other RNA
gctacttaggaggctgaagtgg

SEQ ID NO: 1000 - RNA, 22 nt, synthetic construct
  misc_feature 1..22: note = Synthetic
  source 1..22: mol_type = other RNA
ggatcccttggccccaggagac

SEQ ID NO: 1001 - RNA, 22 nt, synthetic construct
  misc_feature 1..22: note = Synthetic
  source 1..22: mol_type = other RNA
gggcagggagagtgggaggggg

SEQ ID NO: 1002 - RNA, 22 nt, synthetic construct
  misc_feature 1..22: note = Synthetic
  source 1..22: mol_type = other RNA
ggtcttgctctctcacccagga

SEQ ID NO: 1003 - RNA, 22 nt, synthetic construct
  misc_feature 1..22: note = Synthetic
  source 1..22: mol_type = other RNA
gtcgacgccggcgccggcgcgc

SEQ ID NO: 1004 - RNA, 22 nt, synthetic construct
  misc_feature 1..22: note = Synthetic
  source 1..22: mol_type = other RNA
gtcgtgggcttcgcctggccag

SEQ ID NO: 1005 - RNA, 22 nt, synthetic construct
  misc_feature 1..22: note = Synthetic
  source 1..22: mol_type = other RNA
actccatcgtgcaatgagaaag

SEQ ID NO: 1006 - RNA, 22 nt, synthetic construct
  misc_feature 1..22: note = Synthetic
  source 1..22: mol_type = other RNA
agtatggggtccgaggggcagg

SEQ ID NO: 1007 - RNA, 22 nt, synthetic construct
  misc_feature 1..22: note = Synthetic
  source 1..22: mol_type = other RNA
attcgcctttctcattgcacga

SEQ ID NO: 1008 - RNA, 22 nt, synthetic construct
  misc_feature 1..22: note = Synthetic
  source 1..22: mol_type = other RNA
caacccctgtctcctggggcca

SEQ ID NO: 1009 - RNA, 22 nt, synthetic construct
  misc_feature 1..22: note = Synthetic
  source 1..22: mol_type = other RNA
ccacaaaaaatacaaaaattag

SEQ ID NO: 1010 - RNA, 22 nt, synthetic construct
  misc_feature 1..22: note = Synthetic
  source 1..22: mol_type = other RNA
ccacttcagcctcctaagtagc

SEQ ID NO: 1011 - RNA, 22 nt, synthetic construct
  misc_feature 1..22: note = Synthetic
  source 1..22: mol_type = other RNA
ctgttgctaggctcccagaaag

SEQ ID NO: 1012 - RNA, 22 nt, synthetic construct
  misc_feature 1..22: note = Synthetic
  source 1..22: mol_type = other RNA
tcattgggaggcgaggctagag

SEQ ID NO: 1013 - RNA, 22 nt, synthetic construct
  misc_feature 1..22: note = Synthetic
  source 1..22: mol_type = other RNA
tcgcctggccagaaggatgagg

SEQ ID NO: 1014 - RNA, 22 nt, synthetic construct
  misc_feature 1..22: note = Synthetic
  source 1..22: mol_type = other RNA
ttttaaaaattttttgttgaga

SEQ ID NO: 1015 - RNA, 22 nt, synthetic construct
  misc_feature 1..22: note = Synthetic
  source 1..22: mol_type = other RNA
ttttgtattttttgtggagaca

SEQ ID NO: 1016 - RNA, 20 nt, synthetic construct
  misc_feature 1..20: note = Synthetic
  source 1..20: mol_type = other RNA
gacgtctgcgggcgggggcg

SEQ ID NO: 1017 - RNA, 20 nt, synthetic construct
  misc_feature 1..20: note = Synthetic
  source 1..20: mol_type = other RNA
gactgcagaggcgcgcctgg

SEQ ID NO: 1018 - RNA, 20 nt, synthetic construct
  misc_feature 1..20: note = Synthetic
  source 1..20: mol_type = other RNA
gcaacacactcagatccgcc

SEQ ID NO: 1019 - RNA, 20 nt, synthetic construct
  misc_feature 1..20: note = Synthetic
  source 1..20: mol_type = other RNA
gcagtcccaagttcgcgcca

SEQ ID NO: 1020 - RNA, 20 nt, synthetic construct
  misc_feature 1..20: note = Synthetic
  source 1..20: mol_type = other RNA
gcccgcgctttccctcgccc

SEQ ID NO: 1021 - RNA, 20 nt, synthetic construct
  misc_feature 1..20: note = Synthetic
  source 1..20: mol_type = other RNA
gccgtcgcgcggaggacact

SEQ ID NO: 1022 - RNA, 20 nt, synthetic construct
  misc_feature 1..20: note = Synthetic
  source 1..20: mol_type = other RNA
gcctatgcttcgccatgtcg

SEQ ID NO: 1023 - RNA, 20 nt, synthetic construct
  misc_feature 1..20: note = Synthetic
  source 1..20: mol_type = other RNA
gcgcgaacttgggactgcag

SEQ ID NO: 1024 - RNA, 20 nt, synthetic construct
  misc_feature 1..20: note = Synthetic
  source 1..20: mol_type = other RNA
gcgcgcagacgtctgcgggc

SEQ ID NO: 1025 - RNA, 20 nt, synthetic construct
  misc_feature 1..20: note = Synthetic
  source 1..20: mol_type = other RNA
gcggggcatcccgggagcaa

SEQ ID NO: 1026 - RNA, 20 nt, synthetic construct
  misc_feature 1..20: note = Synthetic
  source 1..20: mol_type = other RNA
ggagaccgcgcggggcatcc

SEQ ID NO: 1027 - RNA, 20 nt, synthetic construct
  misc_feature 1..20: note = Synthetic
  source 1..20: mol_type = other RNA
ggagtcgtagtctcccgaat

SEQ ID NO: 1028 - RNA, 20 nt, synthetic construct
  misc_feature 1..20: note = Synthetic
  source 1..20: mol_type = other RNA
ggcctatgcttcgccatgtc

SEQ ID NO: 1029 - RNA, 20 nt, synthetic construct
  misc_feature 1..20: note = Synthetic
  source 1..20: mol_type = other RNA
ggcgggtgcgccgaatgctt

SEQ ID NO: 1030 - RNA, 20 nt, synthetic construct
  misc_feature 1..20: note = Synthetic
  source 1..20: mol_type = other RNA
gggaccaacgcaaggcaagt

SEQ ID NO: 1031 - RNA, 20 nt, synthetic construct
  misc_feature 1..20: note = Synthetic
  source 1..20: mol_type = other RNA
gggagtcgtagtctcccgaa

SEQ ID NO: 1032 - RNA, 20 nt, synthetic construct
  misc_feature 1..20: note = Synthetic
  source 1..20: mol_type = other RNA
gggcctatgcttcgccatgt

SEQ ID NO: 1033 - RNA, 20 nt, synthetic construct
  misc_feature 1..20: note = Synthetic
  source 1..20: mol_type = other RNA
ggggccgtccgcaagcagat

SEQ ID NO: 1034 - RNA, 20 nt, synthetic construct
  misc_feature 1..20: note = Synthetic
  source 1..20: mol_type = other RNA
ggtctgaggagtgactggca

SEQ ID NO: 1035 - RNA, 20 nt, synthetic construct
  misc_feature 1..20: note = Synthetic
  source 1..20: mol_type = other RNA
gtcgtagtctcccgaatggg

SEQ ID NO: 1036 - RNA, 20 nt, synthetic construct
  misc_feature 1..20: note = Synthetic
  source 1..20: mol_type = other RNA
acacccgctcatccagggcg

SEQ ID NO: 1037 - RNA, 20 nt, synthetic construct
  misc_feature 1..20: note = Synthetic
  source 1..20: mol_type = other RNA
acgtctgcgcgcgaatgccg

SEQ ID NO: 1038 - RNA, 20 nt, synthetic construct
  misc_feature 1..20: note = Synthetic
  source 1..20: mol_type = other RNA
attcgcgcgcagacgtctgc

SEQ ID NO: 1039 - RNA, 20 nt, synthetic construct
  misc_feature 1..20: note = Synthetic
  source 1..20: mol_type = other RNA
cacccgctcatccagggcga

SEQ ID NO: 1040 - RNA, 20 nt, synthetic construct
  misc_feature 1..20: note = Synthetic
  source 1..20: mol_type = other RNA
cagtgtcctccgcgcgacgg

SEQ ID NO: 1041 - RNA, 20 nt, synthetic construct
  misc_feature 1..20: note = Synthetic
  source 1..20: mol_type = other RNA
cattcgcgcgcagacgtctg

SEQ ID NO: 1042 - RNA, 20 nt, synthetic construct
  misc_feature 1..20: note = Synthetic
  source 1..20: mol_type = other RNA
cgccgtcgcgcggaggacac

SEQ ID NO: 1043 - RNA, 20 nt, synthetic construct
  misc_feature 1..20: note = Synthetic
  source 1..20: mol_type = other RNA
cgcgcgcagacgtctgcggg

SEQ ID NO: 1044 - RNA, 20 nt, synthetic construct
  misc_feature 1..20: note = Synthetic
  source 1..20: mol_type = other RNA
cggcgcgcgggaccaacgca

SEQ ID NO: 1045 - RNA, 20 nt, synthetic construct
  misc_feature 1..20: note = Synthetic
  source 1..20: mol_type = other RNA
cggcgggtgcgccgaatgct

SEQ ID NO: 1046 - RNA, 20 nt, synthetic construct
  misc_feature 1..20: note = Synthetic
  source 1..20: mol_type = other RNA
cggcggtgcggacggtgccc

SEQ ID NO: 1047 - RNA, 20 nt, synthetic construct
  misc_feature 1..20: note = Synthetic
  source 1..20: mol_type = other RNA
cgggaccaacgcaaggcaag

SEQ ID NO: 1048 - RNA, 20 nt, synthetic construct
  misc_feature 1..20: note = Synthetic
  source 1..20: mol_type = other RNA
tcccagtgtcctccgcgcga

SEQ ID NO: 1049 - RNA, 20 nt, synthetic construct
  misc_feature 1..20: note = Synthetic
  source 1..20: mol_type = other RNA
tccgcgcgacggcggcggtg

SEQ ID NO: 1050 - RNA, 20 nt, synthetic construct
  misc_feature 1..20: note = Synthetic
  source 1..20: mol_type = other RNA
tcgccctggatgagcgggtg

SEQ ID NO: 1051 - RNA, 20 nt, synthetic construct
  misc_feature 1..20: note = Synthetic
  source 1..20: mol_type = other RNA
tcggtggaagcgcccccgcg

SEQ ID NO: 1052 - RNA, 20 nt, synthetic construct
  misc_feature 1..20: note = Synthetic
  source 1..20: mol_type = other RNA
tctcttcccgccgtgcctcg

SEQ ID NO: 1053 - RNA, 20 nt, synthetic construct
  misc_feature 1..20: note = Synthetic
  source 1..20: mol_type = other RNA
tcttcccgccgtgcctcgcg

SEQ ID NO: 1054 - RNA, 20 nt, synthetic construct
  misc_feature 1..20: note = Synthetic
  source 1..20: mol_type = other RNA
tgtcctccgcgcgacggcgg

SEQ ID NO: 1055 - RNA, 20 nt, synthetic construct
  misc_feature 1..20: note = Synthetic
  source 1..20: mol_type = other RNA
ttccctcgccctggatgagc

SEQ ID NO: 1056 - RNA, 22 nt, synthetic construct
  misc_feature 1..22: note = Synthetic
  source 1..22: mol_type = other RNA
gaggcggagggcggcgggtgcg

SEQ ID NO: 1057 - RNA, 22 nt, synthetic construct
  misc_feature 1..22: note = Synthetic
  source 1..22: mol_type = other RNA
gagtgactggcagggaaagagg

SEQ ID NO: 1058 - RNA, 22 nt, synthetic construct
  misc_feature 1..22: note = Synthetic
  source 1..22: mol_type = other RNA
ggacactgggagtcgtagtctc

SEQ ID NO: 1059 - RNA, 22 nt, synthetic construct
  misc_feature 1..22: note = Synthetic
  source 1..22: mol_type = other RNA
ggcctggcccggcccttgctcc

SEQ ID NO: 1060 - RNA, 22 nt, synthetic construct
  misc_feature 1..22: note = Synthetic
  source 1..22: mol_type = other RNA
aatgcccgcgctttccctcgcc

SEQ ID NO: 1061 - RNA, 22 nt, synthetic construct
  misc_feature 1..22: note = Synthetic
  source 1..22: mol_type = other RNA
agcagatgggaggcggagggcg

SEQ ID NO: 1062 - RNA, 22 nt, synthetic construct
  misc_feature 1..22: note = Synthetic
  source 1..22: mol_type = other RNA
agcgggtgtggctgagggtctg

SEQ ID NO: 1063 - RNA, 22 nt, synthetic construct
  misc_feature 1..22: note = Synthetic
  source 1..22: mol_type = other RNA
ccccgcccgcagacgtctgcgc

SEQ ID NO: 1064 - RNA, 22 nt, synthetic construct
  misc_feature 1..22: note = Synthetic
  source 1..22: mol_type = other RNA
ccctggatgagcgggtgtggct

SEQ ID NO: 1065 - RNA, 22 nt, synthetic construct
  misc_feature 1..22: note = Synthetic
  source 1..22: mol_type = other RNA
ccgccgtcgcgcggaggacact

SEQ ID NO: 1066 - RNA, 22 nt, synthetic construct
  misc_feature 1..22: note = Synthetic
  source 1..22: mol_type = other RNA
cgaatgggaggagggcgggaaa

SEQ ID NO: 1067 - RNA, 22 nt, synthetic construct
  misc_feature 1..22: note = Synthetic
  source 1..22: mol_type = other RNA
cgccatgtcggggtgtctgcag

SEQ ID NO: 1068 - RNA, 22 nt, synthetic construct
  misc_feature 1..22: note = Synthetic
  source 1..22: mol_type = other RNA
cgctttccctcgccctggatga

SEQ ID NO: 1069 - RNA, 22 nt, synthetic construct
  misc_feature 1..22: note = Synthetic
  source 1..22: mol_type = other RNA
tgcagaggcgcgcctggcggat

SEQ ID NO: 1070 - RNA, 22 nt, synthetic construct
  misc_feature 1..22: note = Synthetic
  source 1..22: mol_type = other RNA
tgggactgcagaggcgcgcctg

SEQ ID NO: 1071 - RNA, 22 nt, synthetic construct
  misc_feature 1..22: note = Synthetic
  source 1..22: mol_type = other RNA
tggggcctatgcttcgccatgt

SEQ ID NO: 1072 - RNA, 20 nt, synthetic construct
  misc_feature 1..20: note = Synthetic
  source 1..20: mol_type = other RNA
gaatgcaactacgacccacg

SEQ ID NO: 1073 - RNA, 20 nt, synthetic construct
  misc_feature 1..20: note = Synthetic
  source 1..20: mol_type = other RNA
gacaggcgctccaaccgtcg

SEQ ID NO: 1074 - RNA, 20 nt, synthetic construct
  misc_feature 1..20: note = Synthetic
  source 1..20: mol_type = other RNA
gagccggagaggcaggtgag

SEQ ID NO: 1075 - RNA, 20 nt, synthetic construct
  misc_feature 1..20: note = Synthetic
  source 1..20: mol_type = other RNA
gaggcaggtgaggggctacg

SEQ ID NO: 1076 - RNA, 20 nt, synthetic construct
  misc_feature 1..20: note = Synthetic
  source 1..20: mol_type = other RNA
gcgcctgtctctttaaatcc

SEQ ID NO: 1077 - RNA, 20 nt, synthetic construct
  misc_feature 1..20: note = Synthetic
  source 1..20: mol_type = other RNA
gcgcgcaggcgcaagagcca

SEQ ID NO: 1078 - RNA, 20 nt, synthetic construct
  misc_feature 1..20: note = Synthetic
  source 1..20: mol_type = other RNA
ggacccggatttaaagagac

SEQ ID NO: 1079 - RNA, 20 nt, synthetic construct
  misc_feature 1..20: note = Synthetic
  source 1..20: mol_type = other RNA
ggagccggagaggcaggtga

SEQ ID NO: 1080 - RNA, 20 nt, synthetic construct
  misc_feature 1..20: note = Synthetic
  source 1..20: mol_type = other RNA
ggggaccggtcgcgtggccg

SEQ ID NO: 1081 - RNA, 20 nt, synthetic construct
  misc_feature 1..20: note = Synthetic
  source 1..20: mol_type = other RNA
gggggcggggaccggtcgcg

SEQ ID NO: 1082 - RNA, 20 nt, synthetic construct
  misc_feature 1..20: note = Synthetic
  source 1..20: mol_type = other RNA
ggtgagcgccggagccggag

SEQ ID NO: 1083 - RNA, 20 nt, synthetic construct
  misc_feature 1..20: note = Synthetic
  source 1..20: mol_type = other RNA
aacttgctcattacaggccg

SEQ ID NO: 1084 - RNA, 20 nt, synthetic construct
  misc_feature 1..20: note = Synthetic
  source 1..20: mol_type = other RNA
aatccgggtcctagagcggg

SEQ ID NO: 1085 - RNA, 20 nt, synthetic construct
  misc_feature 1..20: note = Synthetic
  source 1..20: mol_type = other RNA
acaggcgctccaaccgtcgt

SEQ ID NO: 1086 - RNA, 20 nt, synthetic construct
  misc_feature 1..20: note = Synthetic
  source 1..20: mol_type = other RNA
actacgacccacgtggcaga

SEQ ID NO: 1087 - RNA, 20 nt, synthetic construct
  misc_feature 1..20: note = Synthetic
  source 1..20: mol_type = other RNA
acttgctcattacaggccgc

SEQ ID NO: 1088 - RNA, 20 nt, synthetic construct
  misc_feature 1..20: note = Synthetic
  source 1..20: mol_type = other RNA
caaccgtcgtgggctgcccg

SEQ ID NO: 1089 - RNA, 20 nt, synthetic construct
  misc_feature 1..20: note = Synthetic
  source 1..20: mol_type = other RNA
caaggccgcggccacgcgac

SEQ ID NO: 1090 - RNA, 20 nt, synthetic construct
  misc_feature 1..20: note = Synthetic
  source 1..20: mol_type = other RNA
ccggcgctcaccgtaggcct

SEQ ID NO: 1091 - RNA, 20 nt, synthetic construct
  misc_feature 1..20: note = Synthetic
  source 1..20: mol_type = other RNA
ccggctccggcgctcaccgt

SEQ ID NO: 1092 - RNA, 20 nt, synthetic construct
  misc_feature 1..20: note = Synthetic
  source 1..20: mol_type = other RNA
cctacggtgagcgccggagc

SEQ ID NO: 1093 - RNA, 20 nt, synthetic construct
  misc_feature 1..20: note = Synthetic
  source 1..20: mol_type = other RNA
cctcggaacttgctcattac

SEQ ID NO: 1094 - RNA, 20 nt, synthetic construct
  misc_feature 1..20: note = Synthetic
  source 1..20: mol_type = other RNA
cctgtaatgagcaagttccg

SEQ ID NO: 1095 - RNA, 20 nt, synthetic construct
  misc_feature 1..20: note = Synthetic
  source 1..20: mol_type = other RNA
cgcgggcagcccacgacggt

SEQ ID NO: 1096 - RNA, 20 nt, synthetic construct
  misc_feature 1..20: note = Synthetic
  source 1..20: mol_type = other RNA
cggtcgcgtggccgcggcct

SEQ ID NO: 1097 - RNA, 20 nt, synthetic construct
  misc_feature 1..20: note = Synthetic
  source 1..20: mol_type = other RNA
ctacgacccacgtggcagac

SEQ ID NO: 1098 - RNA, 20 nt, synthetic construct
  misc_feature 1..20: note = Synthetic
  source 1..20: mol_type = other RNA
tacgacccacgtggcagacg

SEQ ID NO: 1099 - RNA, 20 nt, synthetic construct
  misc_feature 1..20: note = Synthetic
  source 1..20: mol_type = other RNA
tagagcgggaggcagcgcgc

SEQ ID NO: 1100 - RNA, 20 nt, synthetic construct
  misc_feature 1..20: note = Synthetic
  source 1..20: mol_type = other RNA
tgagcaagttccgaggccta

SEQ ID NO: 1101 - RNA, 20 nt, synthetic construct
  misc_feature 1..20: note = Synthetic
  source 1..20: mol_type = other RNA
ttaaatccgggtcctagagc

SEQ ID NO: 1102 - RNA, 20 nt, synthetic construct
  misc_feature 1..20: note = Synthetic
  source 1..20: mol_type = other RNA
tttaaatccgggtcctagag

SEQ ID NO: 1103 - RNA, 22 nt, synthetic construct
  misc_feature 1..22: note = Synthetic
  source 1..22: mol_type = other RNA
gcgctgcctcccgctctaggac

SEQ ID NO: 1104 - RNA, 22 nt, synthetic construct
  misc_feature 1..22: note = Synthetic
  source 1..22: mol_type = other RNA
ggtccccgcccccgtctgccac

SEQ ID NO: 1105 - RNA, 22 nt, synthetic construct
  misc_feature 1..22: note = Synthetic
  source 1..22: mol_type = other RNA
ctcccaaacatcacagggcagg

SEQ ID NO: 1106 - RNA, 22 nt, synthetic construct
  misc_feature 1..22: note = Synthetic
  source 1..22: mol_type = other RNA
tggagcgcctgtctctttaaat

SEQ ID NO: 1107 - RNA, 22 nt, synthetic construct
  misc_feature 1..22: note = Synthetic
  source 1..22: mol_type = other RNA
ttctgcctgccctgtgatgttt

SEQ ID NO: 1108 - RNA, 20 nt, synthetic construct
  misc_feature 1..20: note = Synthetic
  source 1..20: mol_type = other RNA
gaactctatggttccggggc

SEQ ID NO: 1109 - RNA, 20 nt, synthetic construct
  misc_feature 1..20: note = Synthetic
  source 1..20: mol_type = other RNA
gagggaggacgctgggactg

SEQ ID NO: 1110 - RNA, 20 nt, synthetic construct
  misc_feature 1..20: note = Synthetic
  source 1..20: mol_type = other RNA
gctccttccccacgagtcta

SEQ ID NO: 1111 - RNA, 20 nt, synthetic construct
  misc_feature 1..20: note = Synthetic
  source 1..20: mol_type = other RNA
ggactgtggcttgccctgat

SEQ ID NO: 1112 - RNA, 20 nt, synthetic construct
  misc_feature 1..20: note = Synthetic
  source 1..20: mol_type = other RNA
ggaggtttgagtttgaagac

SEQ ID NO: 1113 - RNA, 20 nt, synthetic construct
  misc_feature 1..20: note = Synthetic
  source 1..20: mol_type = other RNA
ggggaaggagcggctctcgc

SEQ ID NO: 1114 - RNA, 20 nt, synthetic construct
  misc_feature 1..20: note = Synthetic
  source 1..20: mol_type = other RNA
ggtttgagtttgaagactgg

SEQ ID NO: 1115 - RNA, 20 nt, synthetic construct
  misc_feature 1..20: note = Synthetic
  source 1..20: mol_type = other RNA
gtcccagcgtcctccctctc

SEQ ID NO: 1116 - RNA, 20 nt, synthetic construct
  misc_feature 1..20: note = Synthetic
  source 1..20: mol_type = other RNA
gtcttcaaactcaaacctcc

SEQ ID NO: 1117 - RNA, 20 nt, synthetic construct
  misc_feature 1..20: note = Synthetic
  source 1..20: mol_type = other RNA
gtttgagtttgaagactggc

SEQ ID NO: 1118 - RNA, 20 nt, synthetic construct
  misc_feature 1..20: note = Synthetic
  source 1..20: mol_type = other RNA
aagccatagactcgtgggga

SEQ ID NO: 1119 - RNA, 20 nt, synthetic construct
  misc_feature 1..20: note = Synthetic
  source 1..20: mol_type = other RNA
acccgaaagccatagactcg

SEQ ID NO: 1120 - RNA, 20 nt, synthetic construct
  misc_feature 1..20: note = Synthetic
  source 1..20: mol_type = other RNA
agaactctatggttccgggg

SEQ ID NO: 1121 - RNA, 20 nt, synthetic construct
  misc_feature 1..20: note = Synthetic
  source 1..20: mol_type = other RNA
aggccagggttctcccgaga

SEQ ID NO: 1122 - RNA, 20 nt, synthetic construct
  misc_feature 1..20: note = Synthetic
  source 1..20: mol_type = other RNA
cacggagaactctatggttc

SEQ ID NO: 1123 - RNA, 20 nt, synthetic construct
  misc_feature 1..20: note = Synthetic
  source 1..20: mol_type = other RNA
caggccagggttctcccgag

SEQ ID NO: 1124 - RNA, 20 nt, synthetic construct
  misc_feature 1..20: note = Synthetic
  source 1..20: mol_type = other RNA
ccagggttctcccgagaggg

SEQ ID NO: 1125 - RNA, 20 nt, synthetic construct
  misc_feature 1..20: note = Synthetic
  source 1..20: mol_type = other RNA
cccacgagtctatggctttc

SEQ ID NO: 1126 - RNA, 20 nt, synthetic construct
  misc_feature 1..20: note = Synthetic
  source 1..20: mol_type = other RNA
ccccacgagtctatggcttt

SEQ ID NO: 1127 - RNA, 20 nt, synthetic construct
  misc_feature 1..20: note = Synthetic
  source 1..20: mol_type = other RNA
cccgaaagccatagactcgt

SEQ ID NO: 1128 - RNA, 20 nt, synthetic construct
  misc_feature 1..20: note = Synthetic
  source 1..20: mol_type = other RNA
ccgaaagccatagactcgtg

SEQ ID NO: 1129 - RNA, 20 nt, synthetic construct
  misc_feature 1..20: note = Synthetic
  source 1..20: mol_type = other RNA
cggaaccatagagttctccg

SEQ ID NO: 1130 - RNA, 20 nt, synthetic construct
  misc_feature 1..20: note = Synthetic
  source 1..20: mol_type = other RNA
cggagaactctatggttccg

SEQ ID NO: 1131 - RNA, 20 nt, synthetic construct
  misc_feature 1..20: note = Synthetic
  source 1..20: mol_type = other RNA
ctatggttccggggcgggcc

SEQ ID NO: 1132 - RNA, 20 nt, synthetic construct
  misc_feature 1..20: note = Synthetic
  source 1..20: mol_type = other RNA
ctcccgagagggaggacgct

SEQ ID NO: 1133 - RNA, 20 nt, synthetic construct
  misc_feature 1..20: note = Synthetic
  source 1..20: mol_type = other RNA
tcaaacctcccggcccgccc

SEQ ID NO: 1134 - RNA, 20 nt, synthetic construct
  misc_feature 1..20: note = Synthetic
  source 1..20: mol_type = other RNA
tcgctggcgtctaagacttc

SEQ ID NO: 1135 - RNA, 20 nt, synthetic construct
  misc_feature 1..20: note = Synthetic
  source 1..20: mol_type = other RNA
tctatggttccggggcgggc

SEQ ID NO: 1136 - RNA, 20 nt, synthetic construct
  misc_feature 1..20: note = Synthetic
  source 1..20: mol_type = other RNA
tctcccgagagggaggacgc

SEQ ID NO: 1137 - RNA, 20 nt, synthetic construct
  misc_feature 1..20: note = Synthetic
  source 1..20: mol_type = other RNA
ttaagccacggagaactcta

SEQ ID NO: 1138 - RNA, 22 nt, synthetic construct
  misc_feature 1..22: note = Synthetic
  source 1..22: mol_type = other RNA
gttccggggcgggccgggaggt

SEQ ID NO: 1139 - RNA, 22 nt, synthetic construct
  misc_feature 1..22: note = Synthetic
  source 1..22: mol_type = other RNA
atgtccgcagctgttgccaggc

SEQ ID NO: 1140 - RNA, 22 nt, synthetic construct
  misc_feature 1..22: note = Synthetic
  source 1..22: mol_type = other RNA
cagcgagagccgctccttcccc

SEQ ID NO: 1141 - RNA, 22 nt, synthetic construct
  misc_feature 1..22: note = Synthetic
  source 1..22: mol_type = other RNA
ctcccggcccgccccggaacca

SEQ ID NO: 1142 - RNA, 22 nt, synthetic construct
  misc_feature 1..22: note = Synthetic
  source 1..22: mol_type = other RNA
cttccccacgagtctatggctt

SEQ ID NO: 1143 - RNA, 22 nt, synthetic construct
  misc_feature 1..22: note = Synthetic
  source 1..22: mol_type = other RNA
tggcttgccctgatcggccgag

SEQ ID NO: 1144 - RNA, 20 nt, synthetic construct
  misc_feature 1..20: note = Synthetic
  source 1..20: mol_type = other RNA
gaagcgcccgccgccggagc

SEQ ID NO: 1145 - RNA, 20 nt, synthetic construct
  misc_feature 1..20: note = Synthetic
  source 1..20: mol_type = other RNA
gaccaatcgggacgcgagac

SEQ ID NO: 1146 - RNA, 20 nt, synthetic construct
  misc_feature 1..20: note = Synthetic
  source 1..20: mol_type = other RNA
gaccggagggggcgtgctga

SEQ ID NO: 1147 - RNA, 20 nt, synthetic construct
  misc_feature 1..20: note = Synthetic
  source 1..20: mol_type = other RNA
gacggcccccgcgaccaatc

SEQ ID NO: 1148 - RNA, 20 nt, synthetic construct
  misc_feature 1..20: note = Synthetic
  source 1..20: mol_type = other RNA
gagctcgcggaggaagtcgg

SEQ ID NO: 1149 - RNA, 20 nt, synthetic construct
  misc_feature 1..20: note = Synthetic
  source 1..20: mol_type = other RNA
gaggaagtcggcgggcgtct

SEQ ID NO: 1150 - RNA, 20 nt, synthetic construct
  misc_feature 1..20: note = Synthetic
  source 1..20: mol_type = other RNA
gcactgtggcgctccggacc

SEQ ID NO: 1151 - RNA, 20 nt, synthetic construct
  misc_feature 1..20: note = Synthetic
  source 1..20: mol_type = other RNA
gcggagctcgcggaggaagt

SEQ ID NO: 1152 - RNA, 20 nt, synthetic construct
  misc_feature 1..20: note = Synthetic
  source 1..20: mol_type = other RNA
ggaccccccgcgcaggaccc

SEQ ID NO: 1153 - RNA, 20 nt, synthetic construct
  misc_feature 1..20: note = Synthetic
  source 1..20: mol_type = other RNA
ggagggggcgtgctgacgga

SEQ ID NO: 1154 - RNA, 20 nt, synthetic construct
  misc_feature 1..20: note = Synthetic
  source 1..20: mol_type = other RNA
ggccgtcagtccggctccgg

SEQ ID NO: 1155 - RNA, 20 nt, synthetic construct
  misc_feature 1..20: note = Synthetic
  source 1..20: mol_type = other RNA
gggacgctgggctgagcggc

SEQ ID NO: 1156 - RNA, 20 nt, synthetic construct
  misc_feature 1..20: note = Synthetic
  source 1..20: mol_type = other RNA
gggggccgtcagtccggctc

SEQ ID NO: 1157 - RNA, 20 nt, synthetic construct
  misc_feature 1..20: note = Synthetic
  source 1..20: mol_type = other RNA
gggtcctgcgcggggggtcc

SEQ ID NO: 1158 - RNA, 20 nt, synthetic construct
  misc_feature 1..20: note = Synthetic
  source 1..20: mol_type = other RNA
ggtcgcgggggccgtcagtc

SEQ ID NO: 1159 - RNA, 20 nt, synthetic construct
  misc_feature 1..20: note = Synthetic
  source 1..20: mol_type = other RNA
gtcagtccggctccggcggc

SEQ ID NO: 1160 - RNA, 20 nt, synthetic construct
  misc_feature 1..20: note = Synthetic
  source 1..20: mol_type = other RNA
gtccgtcagcacgccccctc

SEQ ID NO: 1161 - RNA, 20 nt, synthetic construct
  misc_feature 1..20: note = Synthetic
  source 1..20: mol_type = other RNA
gtctgcggcctcacgcactg

SEQ ID NO: 1162 - RNA, 20 nt, synthetic construct
  misc_feature 1..20: note = Synthetic
  source 1..20: mol_type = other RNA
gtgaggccgcagacgtggca

SEQ ID NO: 1163 - RNA, 20 nt, synthetic construct
  misc_feature 1..20: note = Synthetic
  source 1..20: mol_type = other RNA
gtgggaggggctccgccgtg

SEQ ID NO: 1164 - RNA, 20 nt, synthetic construct
  misc_feature 1..20: note = Synthetic
  source 1..20: mol_type = other RNA
aacctccggggtcctgcgcg

SEQ ID NO: 1165 - RNA, 20 nt, synthetic construct
  misc_feature 1..20: note = Synthetic
  source 1..20: mol_type = other RNA
aatcgggacgcgagaccgga

SEQ ID NO: 1166 - RNA, 20 nt, synthetic construct
  misc_feature 1..20: note = Synthetic
  source 1..20: mol_type = other RNA
acctccggggtcctgcgcgg

SEQ ID NO: 1167 - RNA, 20 nt, synthetic construct
  misc_feature 1..20: note = Synthetic
  source 1..20: mol_type = other RNA
agaggaggagctcgctgccg

SEQ ID NO: 1168 - RNA, 20 nt, synthetic construct
  misc_feature 1..20: note = Synthetic
  source 1..20: mol_type = other RNA
agctcgcggaggaagtcggc

SEQ ID NO: 1169 - RNA, 20 nt, synthetic construct
  misc_feature 1..20: note = Synthetic
  source 1..20: mol_type = other RNA
aggaagtcggcgggcgtctc

SEQ ID NO: 1170 - RNA, 20 nt, synthetic construct
  misc_feature 1..20: note = Synthetic
  source 1..20: mol_type = other RNA
agtgcgtgaggccgcagacg

SEQ ID NO: 1171 - RNA, 20 nt, synthetic construct
  misc_feature 1..20: note = Synthetic
  source 1..20: mol_type = other RNA
atcgggacgcgagaccggag

SEQ ID NO: 1172 - RNA, 20 nt, synthetic construct
  misc_feature 1..20: note = Synthetic
  source 1..20: mol_type = other RNA
caatcgggacgcgagaccgg

SEQ ID NO: 1173 - RNA, 20 nt, synthetic construct
  misc_feature 1..20: note = Synthetic
  source 1..20: mol_type = other RNA
cgccgccggagccggactga

SEQ ID NO: 1174 - RNA, 20 nt, synthetic construct
  misc_feature 1..20: note = Synthetic
  source 1..20: mol_type = other RNA
cgcgtcccgattggtcgcgg

SEQ ID NO: 1175 - RNA, 20 nt, synthetic construct
  misc_feature 1..20: note = Synthetic
  source 1..20: mol_type = other RNA
cggcgggcgtctcgggctcc

SEQ ID NO: 1176 - RNA, 20 nt, synthetic construct
  misc_feature 1..20: note = Synthetic
  source 1..20: mol_type = other RNA
cgtcagtccggctccggcgg

SEQ ID NO: 1177 - RNA, 20 nt, synthetic construct
  misc_feature 1..20: note = Synthetic
  source 1..20: mol_type = other RNA
ctccggtctcgcgtcccgat

SEQ ID NO: 1178 - RNA, 20 nt, synthetic construct
  misc_feature 1..20: note = Synthetic
  source 1..20: mol_type = other RNA
ctcgcgtcccgattggtcgc

SEQ ID NO: 1179 - RNA, 20 nt, synthetic construct
  misc_feature 1..20: note = Synthetic
  source 1..20: mol_type = other RNA
taacctccggggtcctgcgc

SEQ ID NO: 1180 - RNA, 20 nt, synthetic construct
  misc_feature 1..20: note = Synthetic
  source 1..20: mol_type = other RNA
tcgcgtcccgattggtcgcg

SEQ ID NO: 1181 - RNA, 20 nt, synthetic construct
  misc_feature 1..20: note = Synthetic
  source 1..20: mol_type = other RNA
tctcgcgtcccgattggtcg

SEQ ID NO: 1182 - RNA, 20 nt, synthetic construct
  misc_feature 1..20: note = Synthetic
  source 1..20: mol_type = other RNA
tgacggcccccgcgaccaat

SEQ ID NO: 1183 - RNA, 20 nt, synthetic construct
  misc_feature 1..20: note = Synthetic
  source 1..20: mol_type = other RNA
ttaacctccggggtcctgcg

SEQ ID NO: 1184 - RNA, 22 nt, synthetic construct
  misc_feature 1..22: note = Synthetic
  source 1..22: mol_type = other RNA
gccgtgtggaaaacttaacctc

SEQ ID NO: 1185 - RNA, 22 nt, synthetic construct
  misc_feature 1..22: note = Synthetic
  source 1..22: mol_type = other RNA
gcgggcccggcggcggcggcag

SEQ ID NO: 1186 - RNA, 22 nt, synthetic construct
  misc_feature 1..22: note = Synthetic
  source 1..22: mol_type = other RNA
gcgtgaggccgcagacgtggca

SEQ ID NO: 1187 - RNA, 22 nt, synthetic construct
  misc_feature 1..22: note = Synthetic
  source 1..22: mol_type = other RNA
ccggcggcggcggcagcggggt

SEQ ID NO: 1188 - RNA, 22 nt, synthetic construct
  misc_feature 1..22: note = Synthetic
  source 1..22: mol_type = other RNA
tcctgcgcggggggtccgggcc

SEQ ID NO: 1189 - RNA, 22 nt, synthetic construct
  misc_feature 1..22: note = Synthetic
  source 1..22: mol_type = other RNA
ttaacctccggggtcctgcgcg

SEQ ID NO: 1190 - RNA, 20 nt, synthetic construct
  misc_feature 1..20: note = Synthetic
  source 1..20: mol_type = other RNA
gaaactgttcccccgcggag

SEQ ID NO: 1191 - RNA, 20 nt, synthetic construct
  misc_feature 1..20: note = Synthetic
  source 1..20: mol_type = other RNA
gaacgcgcaaaacgccgtgt

SEQ ID NO: 1192 - RNA, 20 nt, synthetic construct
  misc_feature 1..20: note = Synthetic
  source 1..20: mol_type = other RNA
gacgggtggcggccctcgac

SEQ ID NO: 1193 - RNA, 20 nt, synthetic construct
  misc_feature 1..20: note = Synthetic
  source 1..20: mol_type = other RNA
gagcaggcggaccccctccg

SEQ ID NO: 1194 - RNA, 20 nt, synthetic construct
  misc_feature 1..20: note = Synthetic
  source 1..20: mol_type = other RNA
gagggggtccgcctgctctt

SEQ ID NO: 1195 - RNA, 20 nt, synthetic construct
  misc_feature 1..20: note = Synthetic
  source 1..20: mol_type = other RNA
gcacttccgccccccacttc

SEQ ID NO: 1196 - RNA, 20 nt, synthetic construct
  misc_feature 1..20: note = Synthetic
  source 1..20: mol_type = other RNA
gcaggcggaccccctccgcg

SEQ ID NO: 1197 - RNA, 20 nt, synthetic construct
  misc_feature 1..20: note = Synthetic
  source 1..20: mol_type = other RNA
gcctgctcttcggctcctcc

SEQ ID NO: 1198 - RNA, 20 nt, synthetic construct
  misc_feature 1..20: note = Synthetic
  source 1..20: mol_type = other RNA
gcctggaggagccgaagagc

SEQ ID NO: 1199 - RNA, 20 nt, synthetic construct
  misc_feature 1..20: note = Synthetic
  source 1..20: mol_type = other RNA
gcggcgaaccttccagaacc

SEQ ID NO: 1200 - RNA, 20 nt, synthetic construct
  misc_feature 1..20: note = Synthetic
  source 1..20: mol_type = other RNA
gcgggggaacagtttccgcc

SEQ ID NO: 1201 - RNA, 20 nt, synthetic construct
  misc_feature 1..20: note = Synthetic
  source 1..20: mol_type = other RNA
gctggctgacagctggggac

SEQ ID NO: 1202 - RNA, 20 nt, synthetic construct
  misc_feature 1..20: note = Synthetic
  source 1..20: mol_type = other RNA
ggaaactgttcccccgcgga

SEQ ID NO: 1203 - RNA, 20 nt, synthetic construct
  misc_feature 1..20: note = Synthetic
  source 1..20: mol_type = other RNA
ggagtcggttgagttcctga

SEQ ID NO: 1204 - RNA, 20 nt, synthetic construct
  misc_feature 1..20: note = Synthetic
  source 1..20: mol_type = other RNA
ggctgacagctggggacggg

SEQ ID NO: 1205 - RNA, 20 nt, synthetic construct
  misc_feature 1..20: note = Synthetic
  source 1..20: mol_type = other RNA
gggagcacaaagcaacggac

SEQ ID NO: 1206 - RNA, 20 nt, synthetic construct
  misc_feature 1..20: note = Synthetic
  source 1..20: mol_type = other RNA
ggtccgttgctttgtgctcc

SEQ ID NO: 1207 - RNA, 20 nt, synthetic construct
  misc_feature 1..20: note = Synthetic
  source 1..20: mol_type = other RNA
gtggggggcggaagtgcagt

SEQ ID NO: 1208 - RNA, 20 nt, synthetic construct
  misc_feature 1..20: note = Synthetic
  source 1..20: mol_type = other RNA
gttgagttcctgagggaccc

SEQ ID NO: 1209 - RNA, 20 nt, synthetic construct
  misc_feature 1..20: note = Synthetic
  source 1..20: mol_type = other RNA
aaaacgccgtgtaggcctgg

SEQ ID NO: 1210 - RNA, 20 nt, synthetic construct
  misc_feature 1..20: note = Synthetic
  source 1..20: mol_type = other RNA
aaactgttcccccgcggagg

SEQ ID NO: 1211 - RNA, 20 nt, synthetic construct
  misc_feature 1..20: note = Synthetic
  source 1..20: mol_type = other RNA
aaagcaacggaccggaagtg

SEQ ID NO: 1212 - RNA, 20 nt, synthetic construct
  misc_feature 1..20: note = Synthetic
  source 1..20: mol_type = other RNA
aacggaccggaagtgggggg

SEQ ID NO: 1213 - RNA, 20 nt, synthetic construct
  misc_feature 1..20: note = Synthetic
  source 1..20: mol_type = other RNA
aactcaaccgactccagtcg

SEQ ID NO: 1214 - RNA, 20 nt, synthetic construct
  misc_feature 1..20: note = Synthetic
  source 1..20: mol_type = other RNA
acaaagcaacggaccggaag

SEQ ID NO: 1215 - RNA, 20 nt, synthetic construct
  misc_feature 1..20: note = Synthetic
  source 1..20: mol_type = other RNA
actcaaccgactccagtcga

SEQ ID NO: 1216 - RNA, 20 nt, synthetic construct
  misc_feature 1..20: note = Synthetic
  source 1..20: mol_type = other RNA
actctgagctggctgacagc

SEQ ID NO: 1217 - RNA, 20 nt, synthetic construct
  misc_feature 1..20: note = Synthetic
  source 1..20: mol_type = other RNA
agcaacggaccggaagtggg

SEQ ID NO: 1218 - RNA, 20 nt, synthetic construct
  misc_feature 1..20: note = Synthetic
  source 1..20: mol_type = other RNA
agccagctcagagttttcgc

SEQ ID NO: 1219 - RNA, 20 nt, synthetic construct
  misc_feature 1..20: note = Synthetic
  source 1..20: mol_type = other RNA
caaagcaacggaccggaagt

SEQ ID NO: 1220 - RNA, 20 nt, synthetic construct
  misc_feature 1..20: note = Synthetic
  source 1..20: mol_type = other RNA
cgcaaaacgccgtgtaggcc

SEQ ID NO: 1221 - RNA, 20 nt, synthetic construct
  misc_feature 1..20: note = Synthetic
  source 1..20: mol_type = other RNA
cgcggcgaaccttccagaac

SEQ ID NO: 1222 - RNA, 20 nt, synthetic construct
  misc_feature 1..20: note = Synthetic
  source 1..20: mol_type = other RNA
cgcgggggaacagtttccgc

SEQ ID NO: 1223 - RNA, 20 nt, synthetic construct
  misc_feature 1..20: note = Synthetic
  source 1..20: mol_type = other RNA
cggaaactgttcccccgcgg

SEQ ID NO: 1224 - RNA, 20 nt, synthetic construct
  misc_feature 1..20: note = Synthetic
  source 1..20: mol_type = other RNA
cggcggaaactgttcccccg

SEQ ID NO: 1225 - RNA, 20 nt, synthetic construct
  misc_feature 1..20: note = Synthetic
  source 1..20: mol_type = other RNA
cggttctggaaggttcgccg

SEQ ID NO: 1226 - RNA, 20 nt, synthetic construct
  misc_feature 1..20: note = Synthetic
  source 1..20: mol_type = other RNA
cgttttgcgcgttctgtgtc

SEQ ID NO: 1227 - RNA, 20 nt, synthetic construct
  misc_feature 1..20: note = Synthetic
  source 1..20: mol_type = other RNA
tgcccgcgaaaactctgagc

SEQ ID NO: 1228 - RNA, 20 nt, synthetic construct
  misc_feature 1..20: note = Synthetic
  source 1..20: mol_type = other RNA
ttcctgagggaccccggttc

SEQ ID NO: 1229 - RNA, 22 nt, synthetic construct
  misc_feature 1..22: note = Synthetic
  source 1..22: mol_type = other RNA
gcggaaactgttcccccgcgga

SEQ ID NO: 1230 - RNA, 22 nt, synthetic construct
  misc_feature 1..22: note = Synthetic
  source 1..22: mol_type = other RNA
ggcggccctcgactggagtcgg

SEQ ID NO: 1231 - RNA, 22 nt, synthetic construct
  misc_feature 1..22: note = Synthetic
  source 1..22: mol_type = other RNA
gggacgggtggcggccctcgac

SEQ ID NO: 1232 - RNA, 22 nt, synthetic construct
  misc_feature 1..22: note = Synthetic
  source 1..22: mol_type = other RNA
cgtccccagctgtcagccagct

SEQ ID NO: 1233 - RNA, 22 nt, synthetic construct
  misc_feature 1..22: note = Synthetic
  source 1..22: mol_type = other RNA
ctgagctggctgacagctgggg

SEQ ID NO: 1234 - RNA, 22 nt, synthetic construct
  misc_feature 1..22: note = Synthetic
  source 1..22: mol_type = other RNA
tccgcggcgaaccttccagaac

SEQ ID NO: 1235 - RNA, 20 nt, synthetic construct
  misc_feature 1..20: note = Synthetic
  source 1..20: mol_type = other RNA
gaatacagttcaaacctcgc

SEQ ID NO: 1236 - RNA, 20 nt, synthetic construct
  misc_feature 1..20: note = Synthetic
  source 1..20: mol_type = other RNA
gacgcgagacttacgtgatt

SEQ ID NO: 1237 - RNA, 20 nt, synthetic construct
  misc_feature 1..20: note = Synthetic
  source 1..20: mol_type = other RNA
gagcgcagcgattggctccc

SEQ ID NO: 1238 - RNA, 20 nt, synthetic construct
  misc_feature 1..20: note = Synthetic
  source 1..20: mol_type = other RNA
gaggcaggctggtcttcctt

SEQ ID NO: 1239 - RNA, 20 nt, synthetic construct
  misc_feature 1..20: note = Synthetic
  source 1..20: mol_type = other RNA
gaggtttgaactgtattcag

SEQ ID NO: 1240 - RNA, 20 nt, synthetic construct
  misc_feature 1..20: note = Synthetic
  source 1..20: mol_type = other RNA
gcatttttaagtggtgattc

SEQ ID NO: 1241 - RNA, 20 nt, synthetic construct
  misc_feature 1..20: note = Synthetic
  source 1..20: mol_type = other RNA
gccgcgggagggcatcccgt

SEQ ID NO: 1242 - RNA, 20 nt, synthetic construct
  misc_feature 1..20: note = Synthetic
  source 1..20: mol_type = other RNA
gcgactgcggcggccgcggg

SEQ ID NO: 1243 - RNA, 20 nt, synthetic construct
  misc_feature 1..20: note = Synthetic
  source 1..20: mol_type = other RNA
gcgcgtcgcggcagccccca

SEQ ID NO: 1244 - RNA, 20 nt, synthetic construct
  misc_feature 1..20: note = Synthetic
  source 1..20: mol_type = other RNA
gcggcgactgcggcggccgc

SEQ ID NO: 1245 - RNA, 20 nt, synthetic construct
  misc_feature 1..20: note = Synthetic
  source 1..20: mol_type = other RNA
gctgcgctcgccctccgacc

SEQ ID NO: 1246 - RNA, 20 nt, synthetic construct
  misc_feature 1..20: note = Synthetic
  source 1..20: mol_type = other RNA
ggcaggctggtcttccttgg

SEQ ID NO: 1247 - RNA, 20 nt, synthetic construct
  misc_feature 1..20: note = Synthetic
  source 1..20: mol_type = other RNA
ggcgacagcggcgactgcgg

SEQ ID NO: 1248 - RNA, 20 nt, synthetic construct
  misc_feature 1..20: note = Synthetic
  source 1..20: mol_type = other RNA
ggctcccggggcctcccgcg

SEQ ID NO: 1249 - RNA, 20 nt, synthetic construct
  misc_feature 1..20: note = Synthetic
  source 1..20: mol_type = other RNA
ggctctgcttccgggtcgga

SEQ ID NO: 1250 - RNA, 20 nt, synthetic construct
  misc_feature 1..20: note = Synthetic
  source 1..20: mol_type = other RNA
ggggctgccgcgacgcgctg

SEQ ID NO: 1251 - RNA, 20 nt, synthetic construct
  misc_feature 1..20: note = Synthetic
  source 1..20: mol_type = other RNA
gtgtgcggaaggatccccaa

SEQ ID NO: 1252 - RNA, 20 nt, synthetic construct
  misc_feature 1..20: note = Synthetic
  source 1..20: mol_type = other RNA
aagacgtactcttcagtgtg

SEQ ID NO: 1253 - RNA, 20 nt, synthetic construct
  misc_feature 1..20: note = Synthetic
  source 1..20: mol_type = other RNA
acgcgagacttacgtgatta

SEQ ID NO: 1254 - RNA, 20 nt, synthetic construct
  misc_feature 1..20: note = Synthetic
  source 1..20: mol_type = other RNA
acgcgctgtggctctgcttc

SEQ ID NO: 1255 - RNA, 20 nt, synthetic construct
  misc_feature 1..20: note = Synthetic
  source 1..20: mol_type = other RNA
actgtattcagcggcgacag

SEQ ID NO: 1256 - RNA, 20 nt, synthetic construct
  misc_feature 1..20: note = Synthetic
  source 1..20: mol_type = other RNA
agcagagccacagcgcgtcg

SEQ ID NO: 1257 - RNA, 20 nt, synthetic construct
  misc_feature 1..20: note = Synthetic
  source 1..20: mol_type = other RNA
agcgcagcgattggctcccg

SEQ ID NO: 1258 - RNA, 20 nt, synthetic construct
  misc_feature 1..20: note = Synthetic
  source 1..20: mol_type = other RNA
cacactgaagagtacgtctt

SEQ ID NO: 1259 - RNA, 20 nt, synthetic construct
  misc_feature 1..20: note = Synthetic
  source 1..20: mol_type = other RNA
cccaacgggatgccctcccg

SEQ ID NO: 1260 - RNA, 20 nt, synthetic construct
  misc_feature 1..20: note = Synthetic
  source 1..20: mol_type = other RNA
ccgcgggagggcatcccgtt

SEQ ID NO: 1261 - RNA, 20 nt, synthetic construct
  misc_feature 1..20: note = Synthetic
  source 1..20: mol_type = other RNA
cgagcgcagcgattggctcc

SEQ ID NO: 1262 - RNA, 20 nt, synthetic construct
  misc_feature 1..20: note = Synthetic
  source 1..20: mol_type = other RNA
cgcgagacttacgtgattag

SEQ ID NO: 1263 - RNA, 20 nt, synthetic construct
  misc_feature 1..20: note = Synthetic
  source 1..20: mol_type = other RNA
cgcgggagggcatcccgttg

SEQ ID NO: 1264 - RNA, 20 nt, synthetic construct
  misc_feature 1..20: note = Synthetic
  source 1..20: mol_type = other RNA
cggagggcgagcgcagcgat

SEQ ID NO: 1265 - RNA, 20 nt, synthetic construct
  misc_feature 1..20: note = Synthetic
  source 1..20: mol_type = other RNA
cgtactcttcagtgtgcgga

SEQ ID NO: 1266 - RNA, 20 nt, synthetic construct
  misc_feature 1..20: note = Synthetic
  source 1..20: mol_type = other RNA
tacagttcaaacctcgcggg

SEQ ID NO: 1267 - RNA, 20 nt, synthetic construct
  misc_feature 1..20: note = Synthetic
  source 1..20: mol_type = other RNA
tcaaacctcgcgggaggccc

SEQ ID NO: 1268 - RNA, 20 nt, synthetic construct
  misc_feature 1..20: note = Synthetic
  source 1..20: mol_type = other RNA
tcaccacttaaaaatgcgac

SEQ ID NO: 1269 - RNA, 20 nt, synthetic construct
  misc_feature 1..20: note = Synthetic
  source 1..20: mol_type = other RNA
tgaatacagttcaaacctcg

SEQ ID NO: 1270 - RNA, 20 nt, synthetic construct
  misc_feature 1..20: note = Synthetic
  source 1..20: mol_type = other RNA
tgccctgtcgcatttttaag

SEQ ID NO: 1271 - RNA, 20 nt, synthetic construct
  misc_feature 1..20: note = Synthetic
  source 1..20: mol_type = other RNA
tgtgcggaaggatccccaac

SEQ ID NO: 1272 - RNA, 22 nt, synthetic construct
  misc_feature 1..22: note = Synthetic
  source 1..22: mol_type = other RNA
gccgcagtcgccgctgtcgccg

SEQ ID NO: 1273 - RNA, 22 nt, synthetic construct
  misc_feature 1..22: note = Synthetic
  source 1..22: mol_type = other RNA
gcgacgcgctgtggctctgctt

SEQ ID NO: 1274 - RNA, 22 nt, synthetic construct
  misc_feature 1..22: note = Synthetic
  source 1..22: mol_type = other RNA
ggccgcgggagggcatcccgtt

SEQ ID NO: 1275 - RNA, 22 nt, synthetic construct
  misc_feature 1..22: note = Synthetic
  source 1..22: mol_type = other RNA
agacgtactcttcagtgtgcgg

SEQ ID NO: 1276 - RNA, 22 nt, synthetic construct
  misc_feature 1..22: note = Synthetic
  source 1..22: mol_type = other RNA
cagacgcgagacttacgtgatt

SEQ ID NO: 1277 - RNA, 22 nt, synthetic construct
  misc_feature 1..22: note = Synthetic
  source 1..22: mol_type = other RNA
cagtgtgcggaaggatccccaa

SEQ ID NO: 1278 - RNA, 22 nt, synthetic construct
  misc_feature 1..22: note = Synthetic
  source 1..22: mol_type = other RNA
ccgcacactgaagagtacgtct

SEQ ID NO: 1279 - RNA, 22 nt, synthetic construct
  misc_feature 1..22: note = Synthetic
  source 1..22: mol_type = other RNA
ttggggatccttccgcacactg

SEQ ID NO: 1280 - RNA, 20 nt, synthetic construct
  misc_feature 1..20: note = Synthetic
  source 1..20: mol_type = other RNA
gaatccgccccggaatcggg

SEQ ID NO: 1281 - RNA, 20 nt, synthetic construct
  misc_feature 1..20: note = Synthetic
  source 1..20: mol_type = other RNA
gaccggccattactggtgcc

SEQ ID NO: 1282 - RNA, 20 nt, synthetic construct
  misc_feature 1..20: note = Synthetic
  source 1..20: mol_type = other RNA
gacttaaccaacccccgccg

SEQ ID NO: 1283 - RNA, 20 nt, synthetic construct
  misc_feature 1..20: note = Synthetic
  source 1..20: mol_type = other RNA
gcaccagtaatggccggtcc

SEQ ID NO: 1284 - RNA, 20 nt, synthetic construct
  misc_feature 1..20: note = Synthetic
  source 1..20: mol_type = other RNA
gccacacgttgggagcgcgg

SEQ ID NO: 1285 - RNA, 20 nt, synthetic construct
  misc_feature 1..20: note = Synthetic
  source 1..20: mol_type = other RNA
gccgccacacgttgggagcg

SEQ ID NO: 1286 - RNA, 20 nt, synthetic construct
  misc_feature 1..20: note = Synthetic
  source 1..20: mol_type = other RNA
gcgtcgcgagagacacaccc

SEQ ID NO: 1287 - RNA, 20 nt, synthetic construct
  misc_feature 1..20: note = Synthetic
  source 1..20: mol_type = other RNA
ggacgtaccaactgcgcggg

SEQ ID NO: 1288 - RNA, 20 nt, synthetic construct
  misc_feature 1..20: note = Synthetic
  source 1..20: mol_type = other RNA
ggcggcgggtactcactcgc

SEQ ID NO: 1289 - RNA, 20 nt, synthetic construct
  misc_feature 1..20: note = Synthetic
  source 1..20: mol_type = other RNA
ggggtgtgtctctcgcgacg

SEQ ID NO: 1290 - RNA, 20 nt, synthetic construct
  misc_feature 1..20: note = Synthetic
  source 1..20: mol_type = other RNA
gggtgtgtctctcgcgacgc

SEQ ID NO: 1291 - RNA, 20 nt, synthetic construct
  misc_feature 1..20: note = Synthetic
  source 1..20: mol_type = other RNA
ggtcgcgagccgccacacgt

SEQ ID NO: 1292 - RNA, 20 nt, synthetic construct
  misc_feature 1..20: note = Synthetic
  source 1..20: mol_type = other RNA
ggtgtgtctctcgcgacgcg

SEQ ID NO: 1293 - RNA, 20 nt, synthetic construct
  misc_feature 1..20: note = Synthetic
  source 1..20: mol_type = other RNA
gtagaccttctccgggttgc

SEQ ID NO: 1294 - RNA, 20 nt, synthetic construct
  misc_feature 1..20: note = Synthetic
  source 1..20: mol_type = other RNA
gtccctccggacgccgaagt

SEQ ID NO: 1295 - RNA, 20 nt, synthetic construct
  misc_feature 1..20: note = Synthetic
  source 1..20: mol_type = other RNA
gtccgcggcccgctactctc

SEQ ID NO: 1296 - RNA, 20 nt, synthetic construct
  misc_feature 1..20: note = Synthetic
  source 1..20: mol_type = other RNA
gtcgcgagccgccacacgtt

SEQ ID NO: 1297 - RNA, 20 nt, synthetic construct
  misc_feature 1..20: note = Synthetic
  source 1..20: mol_type = other RNA
gtctctcgcgacgcgggggt

SEQ ID NO: 1298 - RNA, 20 nt, synthetic construct
  misc_feature 1..20: note = Synthetic
  source 1..20: mol_type = other RNA
gtgtggcggctcgcgacccc

SEQ ID NO: 1299 - RNA, 20 nt, synthetic construct
  misc_feature 1..20: note = Synthetic
  source 1..20: mol_type = other RNA
gtgtgtctctcgcgacgcgg

SEQ ID NO: 1300 - RNA, 20 nt, synthetic construct
  misc_feature 1..20: note = Synthetic
  source 1..20: mol_type = other RNA
aacccggcaccagtaatggc

SEQ ID NO: 1301 - RNA, 20 nt, synthetic construct
  misc_feature 1..20: note = Synthetic
  source 1..20: mol_type = other RNA
aatccgccccggaatcggga

SEQ ID NO: 1302 - RNA, 20 nt, synthetic construct
  misc_feature 1..20: note = Synthetic
  source 1..20: mol_type = other RNA
acgccgggaccggccattac

SEQ ID NO: 1303 - RNA, 20 nt, synthetic construct
  misc_feature 1..20: note = Synthetic
  source 1..20: mol_type = other RNA
acttaaccaacccccgccgc

SEQ ID NO: 1304 - RNA, 20 nt, synthetic construct
  misc_feature 1..20: note = Synthetic
  source 1..20: mol_type = other RNA
agcccacttcggcgtccgga

SEQ ID NO: 1305 - RNA, 20 nt, synthetic construct
  misc_feature 1..20: note = Synthetic
  source 1..20: mol_type = other RNA
aggtaggcctctcccgacgc

SEQ ID NO: 1306 - RNA, 20 nt, synthetic construct
  misc_feature 1..20: note = Synthetic
  source 1..20: mol_type = other RNA
cccgattccggggcggattc

SEQ ID NO: 1307 - RNA, 20 nt, synthetic construct
  misc_feature 1..20: note = Synthetic
  source 1..20: mol_type = other RNA
cccgcgcagttggtacgtcc

SEQ ID NO: 1308 - RNA, 20 nt, synthetic construct
  misc_feature 1..20: note = Synthetic
  source 1..20: mol_type = other RNA
ccgccccgagagcgtgtctc

SEQ ID NO: 1309 - RNA, 20 nt, synthetic construct
  misc_feature 1..20: note = Synthetic
  source 1..20: mol_type = other RNA
ccggaatccgccccggaatc

SEQ ID NO: 1310 - RNA, 20 nt, synthetic construct
  misc_feature 1..20: note = Synthetic
  source 1..20: mol_type = other RNA
ccgggacgtaccaactgcgc

SEQ ID NO: 1311 - RNA, 20 nt, synthetic construct
  misc_feature 1..20: note = Synthetic
  source 1..20: mol_type = other RNA
cgcagttggtacgtcccgga

SEQ ID NO: 1312 - RNA, 20 nt, synthetic construct
  misc_feature 1..20: note = Synthetic
  source 1..20: mol_type = other RNA
cggcccgctactctccggga

SEQ ID NO: 1313 - RNA, 20 nt, synthetic construct
  misc_feature 1..20: note = Synthetic
  source 1..20: mol_type = other RNA
cgtcccggatggctcccccg

SEQ ID NO: 1314 - RNA, 20 nt, synthetic construct
  misc_feature 1..20: note = Synthetic
  source 1..20: mol_type = other RNA
taatggccggtcccggcgtc

SEQ ID NO: 1315 - RNA, 20 nt, synthetic construct
  misc_feature 1..20: note = Synthetic
  source 1..20: mol_type = other RNA
tccggaatccgccccggaat

SEQ ID NO: 1316 - RNA, 20 nt, synthetic construct
  misc_feature 1..20: note = Synthetic
  source 1..20: mol_type = other RNA
tccggacgccgaagtgggct

SEQ ID NO: 1317 - RNA, 20 nt, synthetic construct
  misc_feature 1..20: note = Synthetic
  source 1..20: mol_type = other RNA
tccgggacgtaccaactgcg

SEQ ID NO: 1318 - RNA, 20 nt, synthetic construct
  misc_feature 1..20: note = Synthetic
  source 1..20: mol_type = other RNA
tgtctctcgcgacgcggggg

SEQ ID NO: 1319 - RNA, 20 nt, synthetic construct
  misc_feature 1..20: note = Synthetic
  source 1..20: mol_type = other RNA
ttaaccaacccccgccgcgg

SEQ ID NO: 1320 - RNA, 22 nt, synthetic construct
  misc_feature 1..22: note = Synthetic
  source 1..22: mol_type = other RNA
gcgtcgggaagcgcccctcccg

SEQ ID NO: 1321 - RNA, 22 nt, synthetic construct
  misc_feature 1..22: note = Synthetic
  source 1..22: mol_type = other RNA
gctggccttgccgaagtcgggg

SEQ ID NO: 1322 - RNA, 22 nt, synthetic construct
  misc_feature 1..22: note = Synthetic
  source 1..22: mol_type = other RNA
gtctacagagcggcctgcgcca

SEQ ID NO: 1323 - RNA, 22 nt, synthetic construct
  misc_feature 1..22: note = Synthetic
  source 1..22: mol_type = other RNA
acagagcggcctgcgccagcga

SEQ ID NO: 1324 - RNA, 22 nt, synthetic construct
  misc_feature 1..22: note = Synthetic
  source 1..22: mol_type = other RNA
agtaatggccggtcccggcgtc

SEQ ID NO: 1325 - RNA, 22 nt, synthetic construct
  misc_feature 1..22: note = Synthetic
  source 1..22: mol_type = other RNA
caggccgctctgtagaccttct

SEQ ID NO: 1326 - RNA, 22 nt, synthetic construct
  misc_feature 1..22: note = Synthetic
  source 1..22: mol_type = other RNA
ccctgcctccttttcttcctca

SEQ ID NO: 1327 - RNA, 22 nt, synthetic construct
  misc_feature 1..22: note = Synthetic
  source 1..22: mol_type = other RNA
ccggaatccgccccggaatcgg

SEQ ID NO: 1328 - RNA, 22 nt, synthetic construct
  misc_feature 1..22: note = Synthetic
  source 1..22: mol_type = other RNA
ccgggaccggccattactggtg

SEQ ID NO: 1329 - RNA, 22 nt, synthetic construct
  misc_feature 1..22: note = Synthetic
  source 1..22: mol_type = other RNA
ccggggcggcccttcctgatgc

SEQ ID NO: 1330 - RNA, 22 nt, synthetic construct
  misc_feature 1..22: note = Synthetic
  source 1..22: mol_type = other RNA
cctcccgcgcagttggtacgtc

SEQ ID NO: 1331 - RNA, 22 nt, synthetic construct
  misc_feature 1..22: note = Synthetic
  source 1..22: mol_type = other RNA
cctccggacgccgaagtgggct

SEQ ID NO: 1332 - RNA, 22 nt, synthetic construct
  misc_feature 1..22: note = Synthetic
  source 1..22: mol_type = other RNA
cggggctggccttgccgaagtc

SEQ ID NO: 1333 - RNA, 22 nt, synthetic construct
  misc_feature 1..22: note = Synthetic
  source 1..22: mol_type = other RNA
cggggtgtgtctctcgcgacgc

SEQ ID NO: 1334 - RNA, 22 nt, synthetic construct
  misc_feature 1..22: note = Synthetic
  source 1..22: mol_type = other RNA
ctgggaccctcccgattccggg

SEQ ID NO: 1335 - RNA, 22 nt, synthetic construct
  misc_feature 1..22: note = Synthetic
  source 1..22: mol_type = other RNA
tcccggatggctcccccgcggc

SEQ ID NO: 1336 - RNA, 22 nt, synthetic construct
  misc_feature 1..22: note = Synthetic
  source 1..22: mol_type = other RNA
tcccggcgtccggaatccgccc

SEQ ID NO: 1337 - RNA, 22 nt, synthetic construct
  misc_feature 1..22: note = Synthetic
  source 1..22: mol_type = other RNA
tgaggaagaaaaggaggcaggg

SEQ ID NO: 1338 - RNA, 22 nt, synthetic construct
  misc_feature 1..22: note = Synthetic
  source 1..22: mol_type = other RNA
tgggcggagctgtgcgcaggcg

SEQ ID NO: 1339 - RNA, 22 nt, synthetic construct
  misc_feature 1..22: note = Synthetic
  source 1..22: mol_type = other RNA
tgtagaccttctccgggttgcc

SEQ ID NO: 1340 - RNA, 20 nt, synthetic construct
  misc_feature 1..20: note = Synthetic
  source 1..20: mol_type = other RNA
gaacccacgcccagcgccgg

SEQ ID NO: 1341 - RNA, 20 nt, synthetic construct
  misc_feature 1..20: note = Synthetic
  source 1..20: mol_type = other RNA
gaaccgtaaatcaagtcgga

SEQ ID NO: 1342 - RNA, 20 nt, synthetic construct
  misc_feature 1..20: note = Synthetic
  source 1..20: mol_type = other RNA
gaaggaaccgtaaatcaagt

SEQ ID NO: 1343 - RNA, 20 nt, synthetic construct
  misc_feature 1..20: note = Synthetic
  source 1..20: mol_type = other RNA
gaagggtgcgcgagcgtctc

SEQ ID NO: 1344 - RNA, 20 nt, synthetic construct
  misc_feature 1..20: note = Synthetic
  source 1..20: mol_type = other RNA
gagagcggcttcccccgggg

SEQ ID NO: 1345 - RNA, 20 nt, synthetic construct
  misc_feature 1..20: note = Synthetic
  source 1..20: mol_type = other RNA
gaggagagcggcttcccccg

SEQ ID NO: 1346 - RNA, 20 nt, synthetic construct
  misc_feature 1..20: note = Synthetic
  source 1..20: mol_type = other RNA
gaggccgcgcagaggagaat

SEQ ID NO: 1347 - RNA, 20 nt, synthetic construct
  misc_feature 1..20: note = Synthetic
  source 1..20: mol_type = other RNA
gcacacagggagctcgatct

SEQ ID NO: 1348 - RNA, 20 nt, synthetic construct
  misc_feature 1..20: note = Synthetic
  source 1..20: mol_type = other RNA
gcagccccaggttctcgacc

SEQ ID NO: 1349 - RNA, 20 nt, synthetic construct
  misc_feature 1..20: note = Synthetic
  source 1..20: mol_type = other RNA
gctgcccgaggcgcgtaagt

SEQ ID NO: 1350 - RNA, 20 nt, synthetic construct
  misc_feature 1..20: note = Synthetic
  source 1..20: mol_type = other RNA
gcttccgggtcgagaacctg

SEQ ID NO: 1351 - RNA, 20 nt, synthetic construct
  misc_feature 1..20: note = Synthetic
  source 1..20: mol_type = other RNA
ggaaccgtaaatcaagtcgg

SEQ ID NO: 1352 - RNA, 20 nt, synthetic construct
  misc_feature 1..20: note = Synthetic
  source 1..20: mol_type = other RNA
ggaggagagcggcttccccc

SEQ ID NO: 1353 - RNA, 20 nt, synthetic construct
  misc_feature 1..20: note = Synthetic
  source 1..20: mol_type = other RNA
ggaggccgcgcagaggagaa

SEQ ID NO: 1354 - RNA, 20 nt, synthetic construct
  misc_feature 1..20: note = Synthetic
  source 1..20: mol_type = other RNA
ggcagcgcgcggtgcacaca

SEQ ID NO: 1355 - RNA, 20 nt, synthetic construct
  misc_feature 1..20: note = Synthetic
  source 1..20: mol_type = other RNA
gggaggagagcggcttcccc

SEQ ID NO: 1356 - RNA, 20 nt, synthetic construct
  misc_feature 1..20: note = Synthetic
  source 1..20: mol_type = other RNA
gggcagcgcgcggtgcacac

SEQ ID NO: 1357 - RNA, 20 nt, synthetic construct
  misc_feature 1..20: note = Synthetic
  source 1..20: mol_type = other RNA
ggggaagagatcttagatgg

SEQ ID NO: 1358 - RNA, 20 nt, synthetic construct
  misc_feature 1..20: note = Synthetic
  source 1..20: mol_type = other RNA
ggtgaactagaacaggcctc

SEQ ID NO: 1359 - RNA, 20 nt, synthetic construct
  misc_feature 1..20: note = Synthetic
  source 1..20: mol_type = other RNA
ggtggttctagccgtgggtg

SEQ ID NO: 1360 - RNA, 20 nt, synthetic construct
  misc_feature 1..20: note = Synthetic
  source 1..20: mol_type = other RNA
aaccgtaaatcaagtcggag

SEQ ID NO: 1361 - RNA, 20 nt, synthetic construct
  misc_feature 1..20: note = Synthetic
  source 1..20: mol_type = other RNA
acccacggctagaaccaccc

SEQ ID NO: 1362 - RNA, 20 nt, synthetic construct
  misc_feature 1..20: note = Synthetic
  source 1..20: mol_type = other RNA
agcttccgggtcgagaacct

SEQ ID NO: 1363 - RNA, 20 nt, synthetic construct
  misc_feature 1..20: note = Synthetic
  source 1..20: mol_type = other RNA
agggagctcgatctaggcta

SEQ ID NO: 1364 - RNA, 20 nt, synthetic construct
  misc_feature 1..20: note = Synthetic
  source 1..20: mol_type = other RNA
cacggctagaaccaccccgg

SEQ ID NO: 1365 - RNA, 20 nt, synthetic construct
  misc_feature 1..20: note = Synthetic
  source 1..20: mol_type = other RNA
cagcttccgggtcgagaacc

SEQ ID NO: 1366 - RNA, 20 nt, synthetic construct
  misc_feature 1..20: note = Synthetic
  source 1..20: mol_type = other RNA
ccacggctagaaccaccccg

SEQ ID NO: 1367 - RNA, 20 nt, synthetic construct
  misc_feature 1..20: note = Synthetic
  source 1..20: mol_type = other RNA
cccacggctagaaccacccc

SEQ ID NO: 1368 - RNA, 20 nt, synthetic construct
  misc_feature 1..20: note = Synthetic
  source 1..20: mol_type = other RNA
ccccggggtggttctagccg

SEQ ID NO: 1369 - RNA, 20 nt, synthetic construct
  misc_feature 1..20: note = Synthetic
  source 1..20: mol_type = other RNA
cccggggtggttctagccgt

SEQ ID NO: 1370 - RNA, 20 nt, synthetic construct
  misc_feature 1..20: note = Synthetic
  source 1..20: mol_type = other RNA
ccgaggcgcgtaagtggggg

SEQ ID NO: 1371 - RNA, 20 nt, synthetic construct
  misc_feature 1..20: note = Synthetic
  source 1..20: mol_type = other RNA
cctcccccacttacgcgcct

SEQ ID NO: 1372 - RNA, 20 nt, synthetic construct
  misc_feature 1..20: note = Synthetic
  source 1..20: mol_type = other RNA
cgcgagcgtctctgggaaga

SEQ ID NO: 1373 - RNA, 20 nt, synthetic construct
  misc_feature 1..20: note = Synthetic
  source 1..20: mol_type = other RNA
cgctgcccgaggcgcgtaag

SEQ ID NO: 1374 - RNA, 20 nt, synthetic construct
  misc_feature 1..20: note = Synthetic
  source 1..20: mol_type = other RNA
ctcgatctaggctatggaca

SEQ ID NO: 1375 - RNA, 20 nt, synthetic construct
  misc_feature 1..20: note = Synthetic
  source 1..20: mol_type = other RNA
cttagatggaggccgcgcag

SEQ ID NO: 1376 - RNA, 20 nt, synthetic construct
  misc_feature 1..20: note = Synthetic
  source 1..20: mol_type = other RNA
tacgcgcctcgggcagcgcg

SEQ ID NO: 1377 - RNA, 20 nt, synthetic construct
  misc_feature 1..20: note = Synthetic
  source 1..20: mol_type = other RNA
tccgaacccacgcccagcgc

SEQ ID NO: 1378 - RNA, 20 nt, synthetic construct
  misc_feature 1..20: note = Synthetic
  source 1..20: mol_type = other RNA
tcgatctaggctatggacaa

SEQ ID NO: 1379 - RNA, 20 nt, synthetic construct
  misc_feature 1..20: note = Synthetic
  source 1..20: mol_type = other RNA
tgcccgaggcgcgtaagtgg

SEQ ID NO: 1380 - RNA, 22 nt, synthetic construct
  misc_feature 1..22: note = Synthetic
  source 1..22: mol_type = other RNA
ggagcgtgggaaggctcagctt

SEQ ID NO: 1381 - RNA, 22 nt, synthetic construct
  misc_feature 1..22: note = Synthetic
  source 1..22: mol_type = other RNA
gggggaggagagcggcttcccc

SEQ ID NO: 1382 - RNA, 22 nt, synthetic construct
  misc_feature 1..22: note = Synthetic
  source 1..22: mol_type = other RNA
aggccgcgcagaggagaatggg

SEQ ID NO: 1383 - RNA, 22 nt, synthetic construct
  misc_feature 1..22: note = Synthetic
  source 1..22: mol_type = other RNA
cagcatctctacgctgagacct

SEQ ID NO: 1384 - RNA, 22 nt, synthetic construct
  misc_feature 1..22: note = Synthetic
  source 1..22: mol_type = other RNA
ctgaggtctcagcgtagagatg

SEQ ID NO: 1385 - RNA, 22 nt, synthetic construct
  misc_feature 1..22: note = Synthetic
  source 1..22: mol_type = other RNA
cttagatggaggccgcgcagag

SEQ ID NO: 1386 - RNA, 22 nt, synthetic construct
  misc_feature 1..22: note = Synthetic
  source 1..22: mol_type = other RNA
ttcccccggggtggttctagcc

SEQ ID NO: 1387 - RNA, 22 nt, synthetic construct
  misc_feature 1..22: note = Synthetic
  source 1..22: mol_type = other RNA
ttttccccctccggcgctgggc

SEQ ID NO: 1388 - RNA, 20 nt, synthetic construct
  misc_feature 1..20: note = Synthetic
  source 1..20: mol_type = other RNA
gaaagactgcagagggatcg

SEQ ID NO: 1389 - RNA, 20 nt, synthetic construct
  misc_feature 1..20: note = Synthetic
  source 1..20: mol_type = other RNA
gagccaatagaatccggtgg

SEQ ID NO: 1390 - RNA, 20 nt, synthetic construct
  misc_feature 1..20: note = Synthetic
  source 1..20: mol_type = other RNA
gcacggactcgcacaggacc

SEQ ID NO: 1391 - RNA, 20 nt, synthetic construct
  misc_feature 1..20: note = Synthetic
  source 1..20: mol_type = other RNA
gccggaagtgctgcgagccc

SEQ ID NO: 1392 - RNA, 20 nt, synthetic construct
  misc_feature 1..20: note = Synthetic
  source 1..20: mol_type = other RNA
gccggacgaacggaaggcgg

SEQ ID NO: 1393 - RNA, 20 nt, synthetic construct
  misc_feature 1..20: note = Synthetic
  source 1..20: mol_type = other RNA
gcctctagcgctgggtgttg

SEQ ID NO: 1394 - RNA, 20 nt, synthetic construct
  misc_feature 1..20: note = Synthetic
  source 1..20: mol_type = other RNA
gcgcgtggggggaataggtg

SEQ ID NO: 1395 - RNA, 20 nt, synthetic construct
  misc_feature 1..20: note = Synthetic
  source 1..20: mol_type = other RNA
gcgggtggagattggcgccg

SEQ ID NO: 1396 - RNA, 20 nt, synthetic construct
  misc_feature 1..20: note = Synthetic
  source 1..20: mol_type = other RNA
gcgtccagatgctagcctcg

SEQ ID NO: 1397 - RNA, 20 nt, synthetic construct
  misc_feature 1..20: note = Synthetic
  source 1..20: mol_type = other RNA
ggagatcccgggagagccgt

SEQ ID NO: 1398 - RNA, 20 nt, synthetic construct
  misc_feature 1..20: note = Synthetic
  source 1..20: mol_type = other RNA
ggagccaatagaatccggtg

SEQ ID NO: 1399 - RNA, 20 nt, synthetic construct
  misc_feature 1..20: note = Synthetic
  source 1..20: mol_type = other RNA
ggccggacgaacggaaggcg

SEQ ID NO: 1400 - RNA, 20 nt, synthetic construct
  misc_feature 1..20: note = Synthetic
  source 1..20: mol_type = other RNA
ggcgctgaaaccgtgaggcc

SEQ ID NO: 1401 - RNA, 20 nt, synthetic construct
  misc_feature 1..20: note = Synthetic
  source 1..20: mol_type = other RNA
ggcgtccagatgctagcctc

SEQ ID NO: 1402 - RNA, 20 nt, synthetic construct
  misc_feature 1..20: note = Synthetic
  source 1..20: mol_type = other RNA
ggctttgaaacttaacagtt

SEQ ID NO: 1403 - RNA, 20 nt, synthetic construct
  misc_feature 1..20: note = Synthetic
  source 1..20: mol_type = other RNA
gggagatcccgggagagccg

SEQ ID NO: 1404 - RNA, 20 nt, synthetic construct
  misc_feature 1..20: note = Synthetic
  source 1..20: mol_type = other RNA
gggccggacgaacggaaggc

SEQ ID NO: 1405 - RNA, 20 nt, synthetic construct
  misc_feature 1..20: note = Synthetic
  source 1..20: mol_type = other RNA
gggcgtccagatgctagcct

SEQ ID NO: 1406 - RNA, 20 nt, synthetic construct
  misc_feature 1..20: note = Synthetic
  source 1..20: mol_type = other RNA
ggtcctgtgcgagtccgtgc

SEQ ID NO: 1407 - RNA, 20 nt, synthetic construct
  misc_feature 1..20: note = Synthetic
  source 1..20: mol_type = other RNA
gttacagagcctctagcgct

SEQ ID NO: 1408 - RNA, 20 nt, synthetic construct
  misc_feature 1..20: note = Synthetic
  source 1..20: mol_type = other RNA
acggagccaatagaatccgg

SEQ ID NO: 1409 - RNA, 20 nt, synthetic construct
  misc_feature 1..20: note = Synthetic
  source 1..20: mol_type = other RNA
agatcgcaggagatccaact

SEQ ID NO: 1410 - RNA, 20 nt, synthetic construct
  misc_feature 1..20: note = Synthetic
  source 1..20: mol_type = other RNA
agcctcgggggccggacgaa

SEQ ID NO: 1411 - RNA, 20 nt, synthetic construct
  misc_feature 1..20: note = Synthetic
  source 1..20: mol_type = other RNA
agcctctagcgctgggtgtt

SEQ ID NO: 1412 - RNA, 20 nt, synthetic construct
  misc_feature 1..20: note = Synthetic
  source 1..20: mol_type = other RNA
atagaatccggtgggggcga

SEQ ID NO: 1413 - RNA, 20 nt, synthetic construct
  misc_feature 1..20: note = Synthetic
  source 1..20: mol_type = other RNA
ccggagcttacggttcagta

SEQ ID NO: 1414 - RNA, 20 nt, synthetic construct
  misc_feature 1..20: note = Synthetic
  source 1..20: mol_type = other RNA
cggagccaatagaatccggt

SEQ ID NO: 1415 - RNA, 20 nt, synthetic construct
  misc_feature 1..20: note = Synthetic
  source 1..20: mol_type = other RNA
cgtccagatgctagcctcgg

SEQ ID NO: 1416 - RNA, 20 nt, synthetic construct
  misc_feature 1..20: note = Synthetic
  source 1..20: mol_type = other RNA
cgttacagagcctctagcgc

SEQ ID NO: 1417 - RNA, 20 nt, synthetic construct
  misc_feature 1..20: note = Synthetic
  source 1..20: mol_type = other RNA
ctacgttctcatcccgcagc

SEQ ID NO: 1418 - RNA, 20 nt, synthetic construct
  misc_feature 1..20: note = Synthetic
  source 1..20: mol_type = other RNA
ctcacggtttcagcgccgcg

SEQ ID NO: 1419 - RNA, 20 nt, synthetic construct
  misc_feature 1..20: note = Synthetic
  source 1..20: mol_type = other RNA
ctcgcggcgctgaaaccgtg

SEQ ID NO: 1420 - RNA, 20 nt, synthetic construct
  misc_feature 1..20: note = Synthetic
  source 1..20: mol_type = other RNA
tcaccagcacggactcgcac

SEQ ID NO: 1421 - RNA, 20 nt, synthetic construct
  misc_feature 1..20: note = Synthetic
  source 1..20: mol_type = other RNA
tcccccgccttccgttcgtc

SEQ ID NO: 1422 - RNA, 20 nt, synthetic construct
  misc_feature 1..20: note = Synthetic
  source 1..20: mol_type = other RNA
tccgagagctccatagcgtc

SEQ ID NO: 1423 - RNA, 20 nt, synthetic construct
  misc_feature 1..20: note = Synthetic
  source 1..20: mol_type = other RNA
tcgcccccaccggattctat

SEQ ID NO: 1424 - RNA, 20 nt, synthetic construct
  misc_feature 1..20: note = Synthetic
  source 1..20: mol_type = other RNA
tcggcaatgattggcttccg

SEQ ID NO: 1425 - RNA, 20 nt, synthetic construct
  misc_feature 1..20: note = Synthetic
  source 1..20: mol_type = other RNA
tcgggggccggacgaacgga

SEQ ID NO: 1426 - RNA, 20 nt, synthetic construct
  misc_feature 1..20: note = Synthetic
  source 1..20: mol_type = other RNA
tggaggaccgcggaggtcgt

SEQ ID NO: 1427 - RNA, 20 nt, synthetic construct
  misc_feature 1..20: note = Synthetic
  source 1..20: mol_type = other RNA
ttccgttcgtccggcccccg

SEQ ID NO: 1428 - RNA, 22 nt, synthetic construct
  misc_feature 1..22: note = Synthetic
  source 1..22: mol_type = other RNA
gaaactgaagccaagtcaatgt

SEQ ID NO: 1429 - RNA, 22 nt, synthetic construct
  misc_feature 1..22: note = Synthetic
  source 1..22: mol_type = other RNA
gaagcccttccggactccgggg

SEQ ID NO: 1430 - RNA, 22 nt, synthetic construct
  misc_feature 1..22: note = Synthetic
  source 1..22: mol_type = other RNA
gacccccatcccacggctctcc

SEQ ID NO: 1431 - RNA, 22 nt, synthetic construct
  misc_feature 1..22: note = Synthetic
  source 1..22: mol_type = other RNA
gatcccgggagagccgtgggat

SEQ ID NO: 1432 - RNA, 22 nt, synthetic construct
  misc_feature 1..22: note = Synthetic
  source 1..22: mol_type = other RNA
gcgccgcggaagccaatcattg

SEQ ID NO: 1433 - RNA, 22 nt, synthetic construct
  misc_feature 1..22: note = Synthetic
  source 1..22: mol_type = other RNA
gctgacccagaatgggcaggtc

SEQ ID NO: 1434 - RNA, 22 nt, synthetic construct
  misc_feature 1..22: note = Synthetic
  source 1..22: mol_type = other RNA
ggaataggtgtggaataaatga

SEQ ID NO: 1435 - RNA, 22 nt, synthetic construct
  misc_feature 1..22: note = Synthetic
  source 1..22: mol_type = other RNA
ggacctgacgctatggagctct

SEQ ID NO: 1436 - RNA, 22 nt, synthetic construct
  misc_feature 1..22: note = Synthetic
  source 1..22: mol_type = other RNA
gggaagagaggaagcgcgtggg

SEQ ID NO: 1437 - RNA, 22 nt, synthetic construct
  misc_feature 1..22: note = Synthetic
  source 1..22: mol_type = other RNA
gggatggtggggacggagccaa

SEQ ID NO: 1438 - RNA, 22 nt, synthetic construct
  misc_feature 1..22: note = Synthetic
  source 1..22: mol_type = other RNA
ggggccggacgaacggaaggcg

SEQ ID NO: 1439 - RNA, 22 nt, synthetic construct
  misc_feature 1..22: note = Synthetic
  source 1..22: mol_type = other RNA
gggggagcgcctgactcagccc

SEQ ID NO: 1440 - RNA, 22 nt, synthetic construct
  misc_feature 1..22: note = Synthetic
  source 1..22: mol_type = other RNA
ggggggaataggtgtggaataa

SEQ ID NO: 1441 - RNA, 22 nt, synthetic construct
  misc_feature 1..22: note = Synthetic
  source 1..22: mol_type = other RNA
aagcgcgtggggggaataggtg

SEQ ID NO: 1442 - RNA, 22 nt, synthetic construct
  misc_feature 1..22: note = Synthetic
  source 1..22: mol_type = other RNA
acaggtgcgggaggcggagact

SEQ ID NO: 1443 - RNA, 22 nt, synthetic construct
  misc_feature 1..22: note = Synthetic
  source 1..22: mol_type = other RNA
agacacgttcccagtgctgacc

SEQ ID NO: 1444 - RNA, 22 nt, synthetic construct
  misc_feature 1..22: note = Synthetic
  source 1..22: mol_type = other RNA
agcctcaagggaaagactgcag

SEQ ID NO: 1445 - RNA, 22 nt, synthetic construct
  misc_feature 1..22: note = Synthetic
  source 1..22: mol_type = other RNA
atcgctccgcccctcgccccca

SEQ ID NO: 1446 - RNA, 22 nt, synthetic construct
  misc_feature 1..22: note = Synthetic
  source 1..22: mol_type = other RNA
atgggagatcccgggagagccg

SEQ ID NO: 1447 - RNA, 22 nt, synthetic construct
  misc_feature 1..22: note = Synthetic
  source 1..22: mol_type = other RNA
cctctctggccccgctccccag

SEQ ID NO: 1448 - RNA, 22 nt, synthetic construct
  misc_feature 1..22: note = Synthetic
  source 1..22: mol_type = other RNA
cggagttttgtgggggacggct

SEQ ID NO: 1449 - RNA, 22 nt, synthetic construct
  misc_feature 1..22: note = Synthetic
  source 1..22: mol_type = other RNA
ctcagtaaggagagacttaagt

SEQ ID NO: 1450 - RNA, 22 nt, synthetic construct
  misc_feature 1..22: note = Synthetic
  source 1..22: mol_type = other RNA
cttactgagaggagggaccaag

SEQ ID NO: 1451 - RNA, 22 nt, synthetic construct
  misc_feature 1..22: note = Synthetic
  source 1..22: mol_type = other RNA
cttcctctcttcccggtcctgt

SEQ ID NO: 1452 - RNA, 22 nt, synthetic construct
  misc_feature 1..22: note = Synthetic
  source 1..22: mol_type = other RNA
tcccatcccagacctgcccatt

SEQ ID NO: 1453 - RNA, 22 nt, synthetic construct
  misc_feature 1..22: note = Synthetic
  source 1..22: mol_type = other RNA
tccgcggtcctccagaaccata

SEQ ID NO: 1454 - RNA, 22 nt, synthetic construct
  misc_feature 1..22: note = Synthetic
  source 1..22: mol_type = other RNA
tctgttctccactgagccctgc

SEQ ID NO: 1455 - RNA, 22 nt, synthetic construct
  misc_feature 1..22: note = Synthetic
  source 1..22: mol_type = other RNA
tgaagccaagtcaatgtctgag

SEQ ID NO: 1456 - RNA, 22 nt, synthetic construct
  misc_feature 1..22: note = Synthetic
  source 1..22: mol_type = other RNA
tggcgttacagagcctctagcg

SEQ ID NO: 1457 - RNA, 22 nt, synthetic construct
  misc_feature 1..22: note = Synthetic
  source 1..22: mol_type = other RNA
tgggaggagagagatgtggcct

SEQ ID NO: 1458 - RNA, 22 nt, synthetic construct
  misc_feature 1..22: note = Synthetic
  source 1..22: mol_type = other RNA
tgtgagtggggggttcctgctg

SEQ ID NO: 1459 - RNA, 22 nt, synthetic construct
  misc_feature 1..22: note = Synthetic
  source 1..22: mol_type = other RNA
ttactgagcgcttctgtgtgcc

SEQ ID NO: 1460 - RNA, 22 nt, synthetic construct
  misc_feature 1..22: note = Synthetic
  source 1..22: mol_type = other RNA
ttgtgggggacggctgtgagtg

SEQ ID NO: 1461 - RNA, 20 nt, synthetic construct
  misc_feature 1..20: note = Synthetic
  source 1..20: mol_type = other RNA
gaagagcttccatggagtca

SEQ ID NO: 1462 - RNA, 20 nt, synthetic construct
  misc_feature 1..20: note = Synthetic
  source 1..20: mol_type = other RNA
gactccatggaagctcttcc

SEQ ID NO: 1463 - RNA, 20 nt, synthetic construct
  misc_feature 1..20: note = Synthetic
  source 1..20: mol_type = other RNA
gagagccgagtccgagagga

SEQ ID NO: 1464 - RNA, 20 nt, synthetic construct
  misc_feature 1..20: note = Synthetic
  source 1..20: mol_type = other RNA
gattgccatggcgccgctgc

SEQ ID NO: 1465 - RNA, 20 nt, synthetic construct
  misc_feature 1..20: note = Synthetic
  source 1..20: mol_type = other RNA
gccatggcaatccgtcgagc

SEQ ID NO: 1466 - RNA, 20 nt, synthetic construct
  misc_feature 1..20: note = Synthetic
  source 1..20: mol_type = other RNA
gccgactcctagtggagagt

SEQ ID NO: 1467 - RNA, 20 nt, synthetic construct
  misc_feature 1..20: note = Synthetic
  source 1..20: mol_type = other RNA
gccggctcgacggattgcca

SEQ ID NO: 1468 - RNA, 20 nt, synthetic construct
  misc_feature 1..20: note = Synthetic
  source 1..20: mol_type = other RNA
gcctactctccactaggagt

SEQ ID NO: 1469 - RNA, 20 nt, synthetic construct
  misc_feature 1..20: note = Synthetic
  source 1..20: mol_type = other RNA
gcgacccggaagagcttcca

SEQ ID NO: 1470 - RNA, 20 nt, synthetic construct
  misc_feature 1..20: note = Synthetic
  source 1..20: mol_type = other RNA
gctggagtacgagcgacagc

SEQ ID NO: 1471 - RNA, 20 nt, synthetic construct
  misc_feature 1..20: note = Synthetic
  source 1..20: mol_type = other RNA
ggaagagcttccatggagtc

SEQ ID NO: 1472 - RNA, 20 nt, synthetic construct
  misc_feature 1..20: note = Synthetic
  source 1..20: mol_type = other RNA
ggctgccgtcctctcggact

SEQ ID NO: 1473 - RNA, 20 nt, synthetic construct
  misc_feature 1..20: note = Synthetic
  source 1..20: mol_type = other RNA
ggctgcgttcggctgcgacc

SEQ ID NO: 1474 - RNA, 20 nt, synthetic construct
  misc_feature 1..20: note = Synthetic
  source 1..20: mol_type = other RNA
gtacgagcgacagctggtgc

SEQ ID NO: 1475 - RNA, 20 nt, synthetic construct
  misc_feature 1..20: note = Synthetic
  source 1..20: mol_type = other RNA
gtactccagcagcggcgcca

SEQ ID NO: 1476 - RNA, 20 nt, synthetic construct
  misc_feature 1..20: note = Synthetic
  source 1..20: mol_type = other RNA
agccggctgccctgactcca

SEQ ID NO: 1477 - RNA, 20 nt, synthetic construct
  misc_feature 1..20: note = Synthetic
  source 1..20: mol_type = other RNA
agtcagggcagccggctcga

SEQ ID NO: 1478 - RNA, 20 nt, synthetic construct
  misc_feature 1..20: note = Synthetic
  source 1..20: mol_type = other RNA
agttcggcctactctccact

SEQ ID NO: 1479 - RNA, 20 nt, synthetic construct
  misc_feature 1..20: note = Synthetic
  source 1..20: mol_type = other RNA
cactaggagtcggcttcctt

SEQ ID NO: 1480 - RNA, 20 nt, synthetic construct
  misc_feature 1..20: note = Synthetic
  source 1..20: mol_type = other RNA
cgaagagagccgagtccgag

SEQ ID NO: 1481 - RNA, 20 nt, synthetic construct
  misc_feature 1..20: note = Synthetic
  source 1..20: mol_type = other RNA
cgaaggaagccgactcctag

SEQ ID NO: 1482 - RNA, 20 nt, synthetic construct
  misc_feature 1..20: note = Synthetic
  source 1..20: mol_type = other RNA
cggctctcttcggttgagtt

SEQ ID NO: 1483 - RNA, 20 nt, synthetic construct
  misc_feature 1..20: note = Synthetic
  source 1..20: mol_type = other RNA
cggcttccttcggctgcgtt

SEQ ID NO: 1484 - RNA, 20 nt, synthetic construct
  misc_feature 1..20: note = Synthetic
  source 1..20: mol_type = other RNA
ctctcggactcggctctctt

SEQ ID NO: 1485 - RNA, 20 nt, synthetic construct
  misc_feature 1..20: note = Synthetic
  source 1..20: mol_type = other RNA
ctggaactgctcgacactga

SEQ ID NO: 1486 - RNA, 20 nt, synthetic construct
  misc_feature 1..20: note = Synthetic
  source 1..20: mol_type = other RNA
tcgcagccgaacgcagccga

SEQ ID NO: 1487 - RNA, 20 nt, synthetic construct
  misc_feature 1..20: note = Synthetic
  source 1..20: mol_type = other RNA
tcggctggctgccgtcctct

SEQ ID NO: 1488 - RNA, 20 nt, synthetic construct
  misc_feature 1..20: note = Synthetic
  source 1..20: mol_type = other RNA
tgactccatggaagctcttc

SEQ ID NO: 1489 - RNA, 20 nt, synthetic construct
  misc_feature 1..20: note = Synthetic
  source 1..20: mol_type = other RNA
tggaactgctcgacactgac

SEQ ID NO: 1490 - RNA, 20 nt, synthetic construct
  misc_feature 1..20: note = Synthetic
  source 1..20: mol_type = other RNA
tgtcgctcgtactccagcag

SEQ ID NO: 1491 - RNA, 20 nt, synthetic construct
  misc_feature 1..20: note = Synthetic
  source 1..20: mol_type = other RNA
ttccatggagtcagggcagc

SEQ ID NO: 1492 - RNA, 22 nt, synthetic construct
  misc_feature 1..22: note = Synthetic
  source 1..22: mol_type = other RNA
ggccgaactcaaccgaagagag

SEQ ID NO: 1493 - RNA, 22 nt, synthetic construct
  misc_feature 1..22: note = Synthetic
  source 1..22: mol_type = other RNA
ccctgactccatggaagctctt

SEQ ID NO: 1494 - RNA, 22 nt, synthetic construct
  misc_feature 1..22: note = Synthetic
  source 1..22: mol_type = other RNA
cgaaggaagccgactcctagtg

SEQ ID NO: 1495 - RNA, 22 nt, synthetic construct
  misc_feature 1..22: note = Synthetic
  source 1..22: mol_type = other RNA
cggattgccatggcgccgctgc

SEQ ID NO: 1496 - RNA, 22 nt, synthetic construct
  misc_feature 1..22: note = Synthetic
  source 1..22: mol_type = other RNA
ctgcgacccggaagagcttcca

SEQ ID NO: 1497 - RNA, 22 nt, synthetic construct
  misc_feature 1..22: note = Synthetic
  source 1..22: mol_type = other RNA
tctcggactcggctctcttcgg

SEQ ID NO: 1498 - RNA, 22 nt, synthetic construct
  misc_feature 1..22: note = Synthetic
  source 1..22: mol_type = other RNA
tgagttcggcctactctccact

SEQ ID NO: 1499 - RNA, 22 nt, synthetic construct
  misc_feature 1..22: note = Synthetic
  source 1..22: mol_type = other RNA
tggagtcagggcagccggctcg

SEQ ID NO: 1500 - RNA, 20 nt, synthetic construct
  misc_feature 1..20: note = Synthetic
  source 1..20: mol_type = other RNA
gaacccgcgtccacggggcg

SEQ ID NO: 1501 - RNA, 20 nt, synthetic construct
  misc_feature 1..20: note = Synthetic
  source 1..20: mol_type = other RNA
gattgctgatgcctggccgc

SEQ ID NO: 1502 - RNA, 20 nt, synthetic construct
  misc_feature 1..20: note = Synthetic
  source 1..20: mol_type = other RNA
gcagggggcgcgcgcgccgc

SEQ ID NO: 1503 - RNA, 20 nt, synthetic construct
  misc_feature 1..20: note = Synthetic
  source 1..20: mol_type = other RNA
gcccacggaacccgcgtcca

SEQ ID NO: 1504 - RNA, 20 nt, synthetic construct
  misc_feature 1..20: note = Synthetic
  source 1..20: mol_type = other RNA
gccccctgccggccgggggg

SEQ ID NO: 1505 - RNA, 20 nt, synthetic construct
  misc_feature 1..20: note = Synthetic
  source 1..20: mol_type = other RNA
gccgctcaggcgcctgcggc

SEQ ID NO: 1506 - RNA, 20 nt, synthetic construct
  misc_feature 1..20: note = Synthetic
  source 1..20: mol_type = other RNA
gcgcacgcgaggcggcgagg

SEQ ID NO: 1507 - RNA, 20 nt, synthetic construct
  misc_feature 1..20: note = Synthetic
  source 1..20: mol_type = other RNA
gcgccgccggccccgccccg

SEQ ID NO: 1508 - RNA, 20 nt, synthetic construct
  misc_feature 1..20: note = Synthetic
  source 1..20: mol_type = other RNA
gcgcgccccctgccggccgg

SEQ ID NO: 1509 - RNA, 20 nt, synthetic construct
  misc_feature 1..20: note = Synthetic
  source 1..20: mol_type = other RNA
gcgcgcgccccctgccggcc

SEQ ID NO: 1510 - RNA, 20 nt, synthetic construct
  misc_feature 1..20: note = Synthetic
  source 1..20: mol_type = other RNA
gcggcgcgcgcgccccctgc

SEQ ID NO: 1511 - RNA, 20 nt, synthetic construct
  misc_feature 1..20: note = Synthetic
  source 1..20: mol_type = other RNA
gcgtgcgctcacccagccgc

SEQ ID NO: 1512 - RNA, 20 nt, synthetic construct
  misc_feature 1..20: note = Synthetic
  source 1..20: mol_type = other RNA
ggaacccgcgtccacggggc

SEQ ID NO: 1513 - RNA, 20 nt, synthetic construct
  misc_feature 1..20: note = Synthetic
  source 1..20: mol_type = other RNA
ggcagcgtgtttctaggtcg

SEQ ID NO: 1514 - RNA, 20 nt, synthetic construct
  misc_feature 1..20: note = Synthetic
  source 1..20: mol_type = other RNA
ggccggtgcggcgtgttcgg

SEQ ID NO: 1515 - RNA, 20 nt, synthetic construct
  misc_feature 1..20: note = Synthetic
  source 1..20: mol_type = other RNA
ggcgtgttcggtggcggctc

SEQ ID NO: 1516 - RNA, 20 nt, synthetic construct
  misc_feature 1..20: note = Synthetic
  source 1..20: mol_type = other RNA
gggaacggcggtggccggtg

SEQ ID NO: 1517 - RNA, 20 nt, synthetic construct
  misc_feature 1..20: note = Synthetic
  source 1..20: mol_type = other RNA
gggttccgtgggcgttcccg

SEQ ID NO: 1518 - RNA, 20 nt, synthetic construct
  misc_feature 1..20: note = Synthetic
  source 1..20: mol_type = other RNA
ggtggccggtgcggcgtgtt

SEQ ID NO: 1519 - RNA, 20 nt, synthetic construct
  misc_feature 1..20: note = Synthetic
  source 1..20: mol_type = other RNA
ggtggcggctctggccgctc

SEQ ID NO: 1520 - RNA, 20 nt, synthetic construct
  misc_feature 1..20: note = Synthetic
  source 1..20: mol_type = other RNA
aactccgccccccggccggc

SEQ ID NO: 1521 - RNA, 20 nt, synthetic construct
  misc_feature 1..20: note = Synthetic
  source 1..20: mol_type = other RNA
aatctatcagggaacggcgg

SEQ ID NO: 1522 - RNA, 20 nt, synthetic construct
  misc_feature 1..20: note = Synthetic
  source 1..20: mol_type = other RNA
actccgccccccggccggca

SEQ ID NO: 1523 - RNA, 20 nt, synthetic construct
  misc_feature 1..20: note = Synthetic
  source 1..20: mol_type = other RNA
agcaatctatcagggaacgg

SEQ ID NO: 1524 - RNA, 20 nt, synthetic construct
  misc_feature 1..20: note = Synthetic
  source 1..20: mol_type = other RNA
ccacggaacccgcgtccacg

SEQ ID NO: 1525 - RNA, 20 nt, synthetic construct
  misc_feature 1..20: note = Synthetic
  source 1..20: mol_type = other RNA
cccacggaacccgcgtccac

SEQ ID NO: 1526 - RNA, 20 nt, synthetic construct
  misc_feature 1..20: note = Synthetic
  source 1..20: mol_type = other RNA
ccccgtggacgcgggttccg

SEQ ID NO: 1527 - RNA, 20 nt, synthetic construct
  misc_feature 1..20: note = Synthetic
  source 1..20: mol_type = other RNA
cccgtggacgcgggttccgt

SEQ ID NO: 1528 - RNA, 20 nt, synthetic construct
  misc_feature 1..20: note = Synthetic
  source 1..20: mol_type = other RNA
ccgctcaggcgcctgcggct

SEQ ID NO: 1529 - RNA, 20 nt, synthetic construct
  misc_feature 1..20: note = Synthetic
  source 1..20: mol_type = other RNA
ccgtgggcgttcccgcggcc

SEQ ID NO: 1530 - RNA, 20 nt, synthetic construct
  misc_feature 1..20: note = Synthetic
  source 1..20: mol_type = other RNA
cctgatagattgctgatgcc

SEQ ID NO: 1531 - RNA, 20 nt, synthetic construct
  misc_feature 1..20: note = Synthetic
  source 1..20: mol_type = other RNA
cctggccgcgggaacgccca

SEQ ID NO: 1532 - RNA, 20 nt, synthetic construct
  misc_feature 1..20: note = Synthetic
  source 1..20: mol_type = other RNA
cgaggcggcagcgtgtttct

SEQ ID NO: 1533 - RNA, 20 nt, synthetic construct
  misc_feature 1..20: note = Synthetic
  source 1..20: mol_type = other RNA
cgccaccgaacacgccgcac

SEQ ID NO: 1534 - RNA, 20 nt, synthetic construct
  misc_feature 1..20: note = Synthetic
  source 1..20: mol_type = other RNA
cggaacccgcgtccacgggg

SEQ ID NO: 1535 - RNA, 20 nt, synthetic construct
  misc_feature 1..20: note = Synthetic
  source 1..20: mol_type = other RNA
cggctgggtgagcgcacgcg

SEQ ID NO: 1536 - RNA, 20 nt, synthetic construct
  misc_feature 1..20: note = Synthetic
  source 1..20: mol_type = other RNA
cggtgcggcgtgttcggtgg

SEQ ID NO: 1537 - RNA, 20 nt, synthetic construct
  misc_feature 1..20: note = Synthetic
  source 1..20: mol_type = other RNA
ctgggtgagcgcacgcgagg

SEQ ID NO: 1538 - RNA, 20 nt, synthetic construct
  misc_feature 1..20: note = Synthetic
  source 1..20: mol_type = other RNA
tatcagggaacggcggtggc

SEQ ID NO: 1539 - RNA, 20 nt, synthetic construct
  misc_feature 1..20: note = Synthetic
  source 1..20: mol_type = other RNA
tgagcgcacgcgaggcggcg

SEQ ID NO: 1540 - RNA, 22 nt, synthetic construct
  misc_feature 1..22: note = Synthetic
  source 1..22: mol_type = other RNA
gcgccccctgccggccgggggg

SEQ ID NO: 1541 - RNA, 22 nt, synthetic construct
  misc_feature 1..22: note = Synthetic
  source 1..22: mol_type = other RNA
ccgccggccccgccccgtggac

SEQ ID NO: 1542 - RNA, 22 nt, synthetic construct
  misc_feature 1..22: note = Synthetic
  source 1..22: mol_type = other RNA
ctggccgctcaggcgcctgcgg

SEQ ID NO: 1543 - RNA, 20 nt, synthetic construct
  misc_feature 1..20: note = Synthetic
  source 1..20: mol_type = other RNA
gaaagagccaagcgtctctc

SEQ ID NO: 1544 - RNA, 20 nt, synthetic construct
  misc_feature 1..20: note = Synthetic
  source 1..20: mol_type = other RNA
gaggccttcaccctctgctc

SEQ ID NO: 1545 - RNA, 20 nt, synthetic construct
  misc_feature 1..20: note = Synthetic
  source 1..20: mol_type = other RNA
gagtcccgggaaagggacag

SEQ ID NO: 1546 - RNA, 20 nt, synthetic construct
  misc_feature 1..20: note = Synthetic
  source 1..20: mol_type = other RNA
gatgctctggggtactggcg

SEQ ID NO: 1547 - RNA, 20 nt, synthetic construct
  misc_feature 1..20: note = Synthetic
  source 1..20: mol_type = other RNA
gctcgctgagacttcctgga

SEQ ID NO: 1548 - RNA, 20 nt, synthetic construct
  misc_feature 1..20: note = Synthetic
  source 1..20: mol_type = other RNA
gctgcttagcggtagcccct

SEQ ID NO: 1549 - RNA, 20 nt, synthetic construct
  misc_feature 1..20: note = Synthetic
  source 1..20: mol_type = other RNA
gggccccctgtccctttccc

SEQ ID NO: 1550 - RNA, 20 nt, synthetic construct
  misc_feature 1..20: note = Synthetic
  source 1..20: mol_type = other RNA
ggggcccaagtgatgctctg

SEQ ID NO: 1551 - RNA, 20 nt, synthetic construct
  misc_feature 1..20: note = Synthetic
  source 1..20: mol_type = other RNA
gggggcccaagtgatgctct

SEQ ID NO: 1552 - RNA, 20 nt, synthetic construct
  misc_feature 1..20: note = Synthetic
  source 1..20: mol_type = other RNA
ggggtactggcgtgggagag

SEQ ID NO: 1553 - RNA, 20 nt, synthetic construct
  misc_feature 1..20: note = Synthetic
  source 1..20: mol_type = other RNA
gggtaaaggtagtagagtcc

SEQ ID NO: 1554 - RNA, 20 nt, synthetic construct
  misc_feature 1..20: note = Synthetic
  source 1..20: mol_type = other RNA
ggtaaaggtagtagagtccc

SEQ ID NO: 1555 - RNA, 20 nt, synthetic construct
  misc_feature 1..20: note = Synthetic
  source 1..20: mol_type = other RNA
ggtacaatcagaggatggga

SEQ ID NO: 1556 - RNA, 20 nt, synthetic construct
  misc_feature 1..20: note = Synthetic
  source 1..20: mol_type = other RNA
ggtagtagagtcccgggaaa

SEQ ID NO: 1557 - RNA, 20 nt, synthetic construct
  misc_feature 1..20: note = Synthetic
  source 1..20: mol_type = other RNA
ggtgaaggcctcctgagcgc

SEQ ID NO: 1558 - RNA, 20 nt, synthetic construct
  misc_feature 1..20: note = Synthetic
  source 1..20: mol_type = other RNA
gtgaaggcctcctgagcgca

SEQ ID NO: 1559 - RNA, 20 nt, synthetic construct
  misc_feature 1..20: note = Synthetic
  source 1..20: mol_type = other RNA
gtgagctcgctgagacttcc

SEQ ID NO: 1560 - RNA, 20 nt, synthetic construct
  misc_feature 1..20: note = Synthetic
  source 1..20: mol_type = other RNA
gtggggtttctcagataact

SEQ ID NO: 1561 - RNA, 20 nt, synthetic construct
  misc_feature 1..20: note = Synthetic
  source 1..20: mol_type = other RNA
aaagagccaagcgtctctcg

SEQ ID NO: 1562 - RNA, 20 nt, synthetic construct
  misc_feature 1..20: note = Synthetic
  source 1..20: mol_type = other RNA
aaattaaaactgcgactgcg

SEQ ID NO: 1563 - RNA, 20 nt, synthetic construct
  misc_feature 1..20: note = Synthetic
  source 1..20: mol_type = other RNA
acgtcatccgggggcagact

SEQ ID NO: 1564 - RNA, 20 nt, synthetic construct
  misc_feature 1..20: note = Synthetic
  source 1..20: mol_type = other RNA
ccaagcgtctctcggggctc

SEQ ID NO: 1565 - RNA, 20 nt, synthetic construct
  misc_feature 1..20: note = Synthetic
  source 1..20: mol_type = other RNA
ccccttggtttccgtggcaa

SEQ ID NO: 1566 - RNA, 20 nt, synthetic construct
  misc_feature 1..20: note = Synthetic
  source 1..20: mol_type = other RNA
cccgcgcttttccgttgcca

SEQ ID NO: 1567 - RNA, 20 nt, synthetic construct
  misc_feature 1..20: note = Synthetic
  source 1..20: mol_type = other RNA
ccgtggcaacggaaaagcgc

SEQ ID NO: 1568 - RNA, 20 nt, synthetic construct
  misc_feature 1..20: note = Synthetic
  source 1..20: mol_type = other RNA
ccgttgccacggaaaccaag

SEQ ID NO: 1569 - RNA, 20 nt, synthetic construct
  misc_feature 1..20: note = Synthetic
  source 1..20: mol_type = other RNA
cctctcagaatacgaaatca

SEQ ID NO: 1570 - RNA, 20 nt, synthetic construct
  misc_feature 1..20: note = Synthetic
  source 1..20: mol_type = other RNA
cgaaatcaaggtacaatcag

SEQ ID NO: 1571 - RNA, 20 nt, synthetic construct
  misc_feature 1..20: note = Synthetic
  source 1..20: mol_type = other RNA
cggtagccccttggtttccg

SEQ ID NO: 1572 - RNA, 20 nt, synthetic construct
  misc_feature 1..20: note = Synthetic
  source 1..20: mol_type = other RNA
ctgcccccggatgacgtaaa

SEQ ID NO: 1573 - RNA, 20 nt, synthetic construct
  misc_feature 1..20: note = Synthetic
  source 1..20: mol_type = other RNA
ctttccttttacgtcatccg

SEQ ID NO: 1574 - RNA, 20 nt, synthetic construct
  misc_feature 1..20: note = Synthetic
  source 1..20: mol_type = other RNA
tacgtcatccgggggcagac

SEQ ID NO: 1575 - RNA, 20 nt, synthetic construct
  misc_feature 1..20: note = Synthetic
  source 1..20: mol_type = other RNA
tcatccgggggcagactggg

SEQ ID NO: 1576 - RNA, 20 nt, synthetic construct
  misc_feature 1..20: note = Synthetic
  source 1..20: mol_type = other RNA
tccgtggcaacggaaaagcg

SEQ ID NO: 1577 - RNA, 20 nt, synthetic construct
  misc_feature 1..20: note = Synthetic
  source 1..20: mol_type = other RNA
tccgttgccacggaaaccaa

SEQ ID NO: 1578 - RNA, 20 nt, synthetic construct
  misc_feature 1..20: note = Synthetic
  source 1..20: mol_type = other RNA
tctttccttttacgtcatcc

SEQ ID NO: 1579 - RNA, 20 nt, synthetic construct
  misc_feature 1..20: note = Synthetic
  source 1..20: mol_type = other RNA
ttccgttgccacggaaacca

SEQ ID NO: 1580 - RNA, 20 nt, synthetic construct
  misc_feature 1..20: note = Synthetic
  source 1..20: mol_type = other RNA
tttccttttacgtcatccgg

SEQ ID NO: 1581 - RNA, 22 nt, synthetic construct
  misc_feature 1..22: note = Synthetic
  source 1..22: mol_type = other RNA
gagccaagcgtctctcggggct

SEQ ID NO: 1582 - RNA, 22 nt, synthetic construct
  misc_feature 1..22: note = Synthetic
  source 1..22: mol_type = other RNA
ggattggccacccagtctgccc

SEQ ID NO: 1583 - RNA, 22 nt, synthetic construct
  misc_feature 1..22: note = Synthetic
  source 1..22: mol_type = other RNA
aaaaggaaagagacggaagagg

SEQ ID NO: 1584 - RNA, 22 nt, synthetic construct
  misc_feature 1..22: note = Synthetic
  source 1..22: mol_type = other RNA
acagggggcccaagtgatgctc

SEQ ID NO: 1585 - RNA, 22 nt, synthetic construct
  misc_feature 1..22: note = Synthetic
  source 1..22: mol_type = other RNA
atacgaaatcaaggtacaatca

SEQ ID NO: 1586 - RNA, 22 nt, synthetic construct
  misc_feature 1..22: note = Synthetic
  source 1..22: mol_type = other RNA
atgctctggggtactggcgtgg

SEQ ID NO: 1587 - RNA, 22 nt, synthetic construct
  misc_feature 1..22: note = Synthetic
  source 1..22: mol_type = other RNA
caggaggccttcaccctctgct

SEQ ID NO: 1588 - RNA, 22 nt, synthetic construct
  misc_feature 1..22: note = Synthetic
  source 1..22: mol_type = other RNA
cctctgctctgggtaaaggtag

SEQ ID NO: 1589 - RNA, 22 nt, synthetic construct
  misc_feature 1..22: note = Synthetic
  source 1..22: mol_type = other RNA
ctaccgctaagcagcagcctct

SEQ ID NO: 1590 - RNA, 22 nt, synthetic construct
  misc_feature 1..22: note = Synthetic
  source 1..22: mol_type = other RNA
tctactacctttacccagagca

SEQ ID NO: 1591 - RNA, 22 nt, synthetic construct
  misc_feature 1..22: note = Synthetic
  source 1..22: mol_type = other RNA
tctggggtactggcgtgggaga

SEQ ID NO: 1592 - RNA, 22 nt, synthetic construct
  misc_feature 1..22: note = Synthetic
  source 1..22: mol_type = other RNA
ttccgtggcaacggaaaagcgc

SEQ ID NO: 1593 - RNA, 22 nt, synthetic construct
  misc_feature 1..22: note = Synthetic
  source 1..22: mol_type = other RNA
ttcctggacgggggacaggctg

SEQ ID NO: 1594 - RNA, 22 nt, synthetic construct
  misc_feature 1..22: note = Synthetic
  source 1..22: mol_type = other RNA
ttttacgtcatccgggggcaga

SEQ ID NO: 1595 - RNA, 20 nt, synthetic construct
  misc_feature 1..20: note = Synthetic
  source 1..20: mol_type = other RNA
gaatcccgaggcaatctcgg

SEQ ID NO: 1596 - RNA, 20 nt, synthetic construct
  misc_feature 1..20: note = Synthetic
  source 1..20: mol_type = other RNA
gacagcccgcgctttaaggc

SEQ ID NO: 1597 - RNA, 20 nt, synthetic construct
  misc_feature 1..20: note = Synthetic
  source 1..20: mol_type = other RNA
gagcccgcgcgacgtcacgc

SEQ ID NO: 1598 - RNA, 20 nt, synthetic construct
  misc_feature 1..20: note = Synthetic
  source 1..20: mol_type = other RNA
gaggagcgggctcttcggtg

SEQ ID NO: 1599 - RNA, 20 nt, synthetic construct
  misc_feature 1..20: note = Synthetic
  source 1..20: mol_type = other RNA
gattcgcgaaagcccccgaa

SEQ ID NO: 1600 - RNA, 20 nt, synthetic construct
  misc_feature 1..20: note = Synthetic
  source 1..20: mol_type = other RNA
gccagacccgcacgcggaac

SEQ ID NO: 1601 - RNA, 20 nt, synthetic construct
  misc_feature 1..20: note = Synthetic
  source 1..20: mol_type = other RNA
gcccgcgccggttccgcgtg

SEQ ID NO: 1602 - RNA, 20 nt, synthetic construct
  misc_feature 1..20: note = Synthetic
  source 1..20: mol_type = other RNA
gcccgggctacactcggtgg

SEQ ID NO: 1603 - RNA, 20 nt, synthetic construct
  misc_feature 1..20: note = Synthetic
  source 1..20: mol_type = other RNA
gccggttccgcgtgcgggtc

SEQ ID NO: 1604 - RNA, 20 nt, synthetic construct
  misc_feature 1..20: note = Synthetic
  source 1..20: mol_type = other RNA
gccttaaagcgcgggctgtc

SEQ ID NO: 1605 - RNA, 20 nt, synthetic construct
  misc_feature 1..20: note = Synthetic
  source 1..20: mol_type = other RNA
gctttaaggccgggggctgc

SEQ ID NO: 1606 - RNA, 20 nt, synthetic construct
  misc_feature 1..20: note = Synthetic
  source 1..20: mol_type = other RNA
ggagcccgcgcgacgtcacg

SEQ ID NO: 1607 - RNA, 20 nt, synthetic construct
  misc_feature 1..20: note = Synthetic
  source 1..20: mol_type = other RNA
ggattcgcgaaagcccccga

SEQ ID NO: 1608 - RNA, 20 nt, synthetic construct
  misc_feature 1..20: note = Synthetic
  source 1..20: mol_type = other RNA
ggcgaagggctcccggggta

SEQ ID NO: 1609 - RNA, 20 nt, synthetic construct
  misc_feature 1..20: note = Synthetic
  source 1..20: mol_type = other RNA
ggctcgcgcgcgcgcttcgg

SEQ ID NO: 1610 - RNA, 20 nt, synthetic construct
  misc_feature 1..20: note = Synthetic
  source 1..20: mol_type = other RNA
ggggcgggcttggcggcgaa

SEQ ID NO: 1611 - RNA, 20 nt, synthetic construct
  misc_feature 1..20: note = Synthetic
  source 1..20: mol_type = other RNA
gggggctttcgcgaatcccg

SEQ ID NO: 1612 - RNA, 20 nt, synthetic construct
  misc_feature 1..20: note = Synthetic
  source 1..20: mol_type = other RNA
ggtagcgctcgtcctcccgc

SEQ ID NO: 1613 - RNA, 20 nt, synthetic construct
  misc_feature 1..20: note = Synthetic
  source 1..20: mol_type = other RNA
gtcgctccgacccagagctc

SEQ ID NO: 1614 - RNA, 20 nt, synthetic construct
  misc_feature 1..20: note = Synthetic
  source 1..20: mol_type = other RNA
gtgcttggcgaagggctccc

SEQ ID NO: 1615 - RNA, 20 nt, synthetic construct
  misc_feature 1..20: note = Synthetic
  source 1..20: mol_type = other RNA
aactcccgcgtgacgtcgcg

SEQ ID NO: 1616 - RNA, 20 nt, synthetic construct
  misc_feature 1..20: note = Synthetic
  source 1..20: mol_type = other RNA
acccgcacgcggaaccggcg

SEQ ID NO: 1617 - RNA, 20 nt, synthetic construct
  misc_feature 1..20: note = Synthetic
  source 1..20: mol_type = other RNA
accgcctccgagattgcctc

SEQ ID NO: 1618 - RNA, 20 nt, synthetic construct
  misc_feature 1..20: note = Synthetic
  source 1..20: mol_type = other RNA
acgaagtgcgccgccgcgat

SEQ ID NO: 1619 - RNA, 20 nt, synthetic construct
  misc_feature 1..20: note = Synthetic
  source 1..20: mol_type = other RNA
acgtcgcgcgggctcccggg

SEQ ID NO: 1620 - RNA, 20 nt, synthetic construct
  misc_feature 1..20: note = Synthetic
  source 1..20: mol_type = other RNA
actcccgcgtgacgtcgcgc

SEQ ID NO: 1621 - RNA, 20 nt, synthetic construct
  misc_feature 1..20: note = Synthetic
  source 1..20: mol_type = other RNA
agcccgcgctttaaggccgg

SEQ ID NO: 1622 - RNA, 20 nt, synthetic construct
  misc_feature 1..20: note = Synthetic
  source 1..20: mol_type = other RNA
caaccatcgccctccgggat

SEQ ID NO: 1623 - RNA, 20 nt, synthetic construct
  misc_feature 1..20: note = Synthetic
  source 1..20: mol_type = other RNA
cacgaagtgcgccgccgcga

SEQ ID NO: 1624 - RNA, 20 nt, synthetic construct
  misc_feature 1..20: note = Synthetic
  source 1..20: mol_type = other RNA
catcccggagggcgatggtt

SEQ ID NO: 1625 - RNA, 20 nt, synthetic construct
  misc_feature 1..20: note = Synthetic
  source 1..20: mol_type = other RNA
cccgcgccggttccgcgtgc

SEQ ID NO: 1626 - RNA, 20 nt, synthetic construct
  misc_feature 1..20: note = Synthetic
  source 1..20: mol_type = other RNA
cgcgaatcccgaggcaatct

SEQ ID NO: 1627 - RNA, 20 nt, synthetic construct
  misc_feature 1..20: note = Synthetic
  source 1..20: mol_type = other RNA
cgcgcgcttcggaggttttt

SEQ ID NO: 1628 - RNA, 20 nt, synthetic construct
  misc_feature 1..20: note = Synthetic
  source 1..20: mol_type = other RNA
cgggcccgggctacactcgg

SEQ ID NO: 1629 - RNA, 20 nt, synthetic construct
  misc_feature 1..20: note = Synthetic
  source 1..20: mol_type = other RNA
cgtgacgtcgcgcgggctcc

SEQ ID NO: 1630 - RNA, 20 nt, synthetic construct
  misc_feature 1..20: note = Synthetic
  source 1..20: mol_type = other RNA
taaagcgcgggctgtccgga

SEQ ID NO: 1631 - RNA, 20 nt, synthetic construct
  misc_feature 1..20: note = Synthetic
  source 1..20: mol_type = other RNA
tcccgaggcaatctcggagg

SEQ ID NO: 1632 - RNA, 20 nt, synthetic construct
  misc_feature 1..20: note = Synthetic
  source 1..20: mol_type = other RNA
tccggacagcccgcgcttta

SEQ ID NO: 1633 - RNA, 20 nt, synthetic construct
  misc_feature 1..20: note = Synthetic
  source 1..20: mol_type = other RNA
tcggtgcggcccatcccgga

SEQ ID NO: 1634 - RNA, 20 nt, synthetic construct
  misc_feature 1..20: note = Synthetic
  source 1..20: mol_type = other RNA
ttaaagcgcgggctgtccgg

SEQ ID NO: 1635 - RNA, 22 nt, synthetic construct
  misc_feature 1..22: note = Synthetic
  source 1..22: mol_type = other RNA
gagcgctacctcagtactactt

SEQ ID NO: 1636 - RNA, 22 nt, synthetic construct
  misc_feature 1..22: note = Synthetic
  source 1..22: mol_type = other RNA
gcagtcgctccgacccagagct

SEQ ID NO: 1637 - RNA, 22 nt, synthetic construct
  misc_feature 1..22: note = Synthetic
  source 1..22: mol_type = other RNA
gggagcccgcgcgacgtcacgc

SEQ ID NO: 1638 - RNA, 22 nt, synthetic construct
  misc_feature 1..22: note = Synthetic
  source 1..22: mol_type = other RNA
gggtaggggtggctcccggctc

SEQ ID NO: 1639 - RNA, 22 nt, synthetic construct
  misc_feature 1..22: note = Synthetic
  source 1..22: mol_type = other RNA
ggtgcccgcgccggttccgcgt

SEQ ID NO: 1640 - RNA, 22 nt, synthetic construct
  misc_feature 1..22: note = Synthetic
  source 1..22: mol_type = other RNA
gtcgcgcgggctcccgggcggg

SEQ ID NO: 1641 - RNA, 22 nt, synthetic construct
  misc_feature 1..22: note = Synthetic
  source 1..22: mol_type = other RNA
ccttaaagcgcgggctgtccgg

SEQ ID NO: 1642 - RNA, 22 nt, synthetic construct
  misc_feature 1..22: note = Synthetic
  source 1..22: mol_type = other RNA
cgctccgacccagagctccggg

SEQ ID NO: 1643 - RNA, 22 nt, synthetic construct
  misc_feature 1..22: note = Synthetic
  source 1..22: mol_type = other RNA
cggaggggtcggctttcccacc

SEQ ID NO: 1644 - RNA, 22 nt, synthetic construct
  misc_feature 1..22: note = Synthetic
  source 1..22: mol_type = other RNA
cggcgcgggcacctggggagaa

SEQ ID NO: 1645 - RNA, 22 nt, synthetic construct
  misc_feature 1..22: note = Synthetic
  source 1..22: mol_type = other RNA
ctcaccgcctccgagattgcct

SEQ ID NO: 1646 - RNA, 22 nt, synthetic construct
  misc_feature 1..22: note = Synthetic
  source 1..22: mol_type = other RNA
ctctttcgcccttttccctcac

SEQ ID NO: 1647 - RNA, 22 nt, synthetic construct
  misc_feature 1..22: note = Synthetic
  source 1..22: mol_type = other RNA
cttggcgaagggctcccggggt

SEQ ID NO: 1648 - RNA, 22 nt, synthetic construct
  misc_feature 1..22: note = Synthetic
  source 1..22: mol_type = other RNA
tcccgaggcaatctcggaggcg

SEQ ID NO: 1649 - RNA, 22 nt, synthetic construct
  misc_feature 1..22: note = Synthetic
  source 1..22: mol_type = other RNA
tcctcccgccggtccaccacca

SEQ ID NO: 1650 - RNA, 22 nt, synthetic construct
  misc_feature 1..22: note = Synthetic
  source 1..22: mol_type = other RNA
tcgcttcccttcgggggctttc

SEQ ID NO: 1651 - RNA, 22 nt, synthetic construct
  misc_feature 1..22: note = Synthetic
  source 1..22: mol_type = other RNA
tctctttaccccacccggagct

SEQ ID NO: 1652 - RNA, 22 nt, synthetic construct
  misc_feature 1..22: note = Synthetic
  source 1..22: mol_type = other RNA
tgcgtgcttggcgaagggctcc

SEQ ID NO: 1653 - RNA, 20 nt, synthetic construct
  misc_feature 1..20: note = Synthetic
  source 1..20: mol_type = other RNA
gacgcgcaggtcgaccccca

SEQ ID NO: 1654 - RNA, 20 nt, synthetic construct
  misc_feature 1..20: note = Synthetic
  source 1..20: mol_type = other RNA
gacgtcacatcctctgggcg

SEQ ID NO: 1655 - RNA, 20 nt, synthetic construct
  misc_feature 1..20: note = Synthetic
  source 1..20: mol_type = other RNA
gagagcagacgattccgggc

SEQ ID NO: 1656 - RNA, 20 nt, synthetic construct
  misc_feature 1..20: note = Synthetic
  source 1..20: mol_type = other RNA
gaggagagtcccttctcgga

SEQ ID NO: 1657 - RNA, 20 nt, synthetic construct
  misc_feature 1..20: note = Synthetic
  source 1..20: mol_type = other RNA
gagggtcggaggtgacgcgc

SEQ ID NO: 1658 - RNA, 20 nt, synthetic construct
  misc_feature 1..20: note = Synthetic
  source 1..20: mol_type = other RNA
gataagagagcagacgattc

SEQ ID NO: 1659 - RNA, 20 nt, synthetic construct
  misc_feature 1..20: note = Synthetic
  source 1..20: mol_type = other RNA
gcacatctccgcgagacaga

SEQ ID NO: 1660 - RNA, 20 nt, synthetic construct
  misc_feature 1..20: note = Synthetic
  source 1..20: mol_type = other RNA
gcctaaggaaacgtgtcgtc

SEQ ID NO: 1661 - RNA, 20 nt, synthetic construct
  misc_feature 1..20: note = Synthetic
  source 1..20: mol_type = other RNA
gcggaaaaatgaggtaagtc

SEQ ID NO: 1662 - RNA, 20 nt, synthetic construct
  misc_feature 1..20: note = Synthetic
  source 1..20: mol_type = other RNA
gcgggctgtgcggaggctaa

SEQ ID NO: 1663 - RNA, 20 nt, synthetic construct
  misc_feature 1..20: note = Synthetic
  source 1..20: mol_type = other RNA
gcgttgacgtcacatcctct

SEQ ID NO: 1664 - RNA, 20 nt, synthetic construct
  misc_feature 1..20: note = Synthetic
  source 1..20: mol_type = other RNA
gctaatgggtgggttccctt

SEQ ID NO: 1665 - RNA, 20 nt, synthetic construct
  misc_feature 1..20: note = Synthetic
  source 1..20: mol_type = other RNA
gctgacctttcaatttgcgc

SEQ ID NO: 1666 - RNA, 20 nt, synthetic construct
  misc_feature 1..20: note = Synthetic
  source 1..20: mol_type = other RNA
ggaaacgtgtcgtctggaat

SEQ ID NO: 1667 - RNA, 20 nt, synthetic construct
  misc_feature 1..20: note = Synthetic
  source 1..20: mol_type = other RNA
ggctaatgggtgggttccct

SEQ ID NO: 1668 - RNA, 20 nt, synthetic construct
  misc_feature 1..20: note = Synthetic
  source 1..20: mol_type = other RNA
ggctgacctttcaatttgcg

SEQ ID NO: 1669 - RNA, 20 nt, synthetic construct
  misc_feature 1..20: note = Synthetic
  source 1..20: mol_type = other RNA
gggattcgggtcttccagga

SEQ ID NO: 1670 - RNA, 20 nt, synthetic construct
  misc_feature 1..20: note = Synthetic
  source 1..20: mol_type = other RNA
gtgagttaggggcgtcggag

SEQ ID NO: 1671 - RNA, 20 nt, synthetic construct
  misc_feature 1..20: note = Synthetic
  source 1..20: mol_type = other RNA
gtgttctgcgttgccggccg

SEQ ID NO: 1672 - RNA, 20 nt, synthetic construct
  misc_feature 1..20: note = Synthetic
  source 1..20: mol_type = other RNA
gttgccggccgtgggtgctc

SEQ ID NO: 1673 - RNA, 20 nt, synthetic construct
  misc_feature 1..20: note = Synthetic
  source 1..20: mol_type = other RNA
aatcggctccgctcaagggg

SEQ ID NO: 1674 - RNA, 20 nt, synthetic construct
  misc_feature 1..20: note = Synthetic
  source 1..20: mol_type = other RNA
accgcaatcggctccgctca

SEQ ID NO: 1675 - RNA, 20 nt, synthetic construct
  misc_feature 1..20: note = Synthetic
  source 1..20: mol_type = other RNA
acgcgcaggtcgacccccaa

SEQ ID NO: 1676 - RNA, 20 nt, synthetic construct
  misc_feature 1..20: note = Synthetic
  source 1..20: mol_type = other RNA
acggccggcaacgcagaaca

SEQ ID NO: 1677 - RNA, 20 nt, synthetic construct
  misc_feature 1..20: note = Synthetic
  source 1..20: mol_type = other RNA
aggaacccgcgcaaattgaa

SEQ ID NO: 1678 - RNA, 20 nt, synthetic construct
  misc_feature 1..20: note = Synthetic
  source 1..20: mol_type = other RNA
cagcctttcgcgcgctgtgt

SEQ ID NO: 1679 - RNA, 20 nt, synthetic construct
  misc_feature 1..20: note = Synthetic
  source 1..20: mol_type = other RNA
ccgaccctcctctcgggatt

SEQ ID NO: 1680 - RNA, 20 nt, synthetic construct
  misc_feature 1..20: note = Synthetic
  source 1..20: mol_type = other RNA
ccgcaatcggctccgctcaa

SEQ ID NO: 1681 - RNA, 20 nt, synthetic construct
  misc_feature 1..20: note = Synthetic
  source 1..20: mol_type = other RNA
cgcaatcggctccgctcaag

SEQ ID NO: 1682 - RNA, 20 nt, synthetic construct
  misc_feature 1..20: note = Synthetic
  source 1..20: mol_type = other RNA
cgcgttgacgtcacatcctc

SEQ ID NO: 1683 - RNA, 20 nt, synthetic construct
  misc_feature 1..20: note = Synthetic
  source 1..20: mol_type = other RNA
cggccggcaacgcagaacac

SEQ ID NO: 1684 - RNA, 20 nt, synthetic construct
  misc_feature 1..20: note = Synthetic
  source 1..20: mol_type = other RNA
cgggtttctccaaccgcaat

SEQ ID NO: 1685 - RNA, 20 nt, synthetic construct
  misc_feature 1..20: note = Synthetic
  source 1..20: mol_type = other RNA
ctcgcggagatgtgcaggcg

SEQ ID NO: 1686 - RNA, 20 nt, synthetic construct
  misc_feature 1..20: note = Synthetic
  source 1..20: mol_type = other RNA
tcaacgcgtatcccgcaacc

SEQ ID NO: 1687 - RNA, 20 nt, synthetic construct
  misc_feature 1..20: note = Synthetic
  source 1..20: mol_type = other RNA
tctcgggattcgggtcttcc

SEQ ID NO: 1688 - RNA, 20 nt, synthetic construct
  misc_feature 1..20: note = Synthetic
  source 1..20: mol_type = other RNA
tgagcggagccgattgcggt

SEQ ID NO: 1689 - RNA, 20 nt, synthetic construct
  misc_feature 1..20: note = Synthetic
  source 1..20: mol_type = other RNA
tggaagacccgaatcccgag

SEQ ID NO: 1690 - RNA, 20 nt, synthetic construct
  misc_feature 1..20: note = Synthetic
  source 1..20: mol_type = other RNA
tgttctgcgttgccggccgt

SEQ ID NO: 1691 - RNA, 20 nt, synthetic construct
  misc_feature 1..20: note = Synthetic
  source 1..20: mol_type = other RNA
ttacccgtgttctgcgttgc

SEQ ID NO: 1692 - RNA, 20 nt, synthetic construct
  misc_feature 1..20: note = Synthetic
  source 1..20: mol_type = other RNA
ttgcctacacagcgcgcgaa

SEQ ID NO: 1693 - RNA, 22 nt, synthetic construct
  misc_feature 1..22: note = Synthetic
  source 1..22: mol_type = other RNA
gattccgggctggagcaggcgc

SEQ ID NO: 1694 - RNA, 22 nt, synthetic construct
  misc_feature 1..22: note = Synthetic
  source 1..22: mol_type = other RNA
gcctcctgcggcttccaactca

SEQ ID NO: 1695 - RNA, 22 nt, synthetic construct
  misc_feature 1..22: note = Synthetic
  source 1..22: mol_type = other RNA
gcgtcacctccgaccctcctct

SEQ ID NO: 1696 - RNA, 22 nt, synthetic construct
  misc_feature 1..22: note = Synthetic
  source 1..22: mol_type = other RNA
ggagagctcaggacgcaaccct

SEQ ID NO: 1697 - RNA, 22 nt, synthetic construct
  misc_feature 1..22: note = Synthetic
  source 1..22: mol_type = other RNA
ggagcgggctgtgcggaggcta

SEQ ID NO: 1698 - RNA, 22 nt, synthetic construct
  misc_feature 1..22: note = Synthetic
  source 1..22: mol_type = other RNA
ggccgtgggtgctctggccaca

SEQ ID NO: 1699 - RNA, 22 nt, synthetic construct
  misc_feature 1..22: note = Synthetic
  source 1..22: mol_type = other RNA
gggtcttccaggaagggaagga

SEQ ID NO: 1700 - RNA, 22 nt, synthetic construct
  misc_feature 1..22: note = Synthetic
  source 1..22: mol_type = other RNA
gggttccttgcggccccgccca

SEQ ID NO: 1701 - RNA, 22 nt, synthetic construct
  misc_feature 1..22: note = Synthetic
  source 1..22: mol_type = other RNA
aaaggctgacctttcaatttgc

SEQ ID NO: 1702 - RNA, 22 nt, synthetic construct
  misc_feature 1..22: note = Synthetic
  source 1..22: mol_type = other RNA
aaccctggcgcctgctccagcc

SEQ ID NO: 1703 - RNA, 22 nt, synthetic construct
  misc_feature 1..22: note = Synthetic
  source 1..22: mol_type = other RNA
acagcggagcccttagcctgag

SEQ ID NO: 1704 - RNA, 22 nt, synthetic construct
  misc_feature 1..22: note = Synthetic
  source 1..22: mol_type = other RNA
acagtgagttaggggcgtcgga

SEQ ID NO: 1705 - RNA, 22 nt, synthetic construct
  misc_feature 1..22: note = Synthetic
  source 1..22: mol_type = other RNA
acccaacagcggagcccttagc

SEQ ID NO: 1706 - RNA, 22 nt, synthetic construct
  misc_feature 1..22: note = Synthetic
  source 1..22: mol_type = other RNA
actcaggctaagggctccgctg

SEQ ID NO: 1707 - RNA, 22 nt, synthetic construct
  misc_feature 1..22: note = Synthetic
  source 1..22: mol_type = other RNA
aggcctaaggaaacgtgtcgtc

SEQ ID NO: 1708 - RNA, 22 nt, synthetic construct
  misc_feature 1..22: note = Synthetic
  source 1..22: mol_type = other RNA
aggctaatgggtgggttccctt

SEQ ID NO: 1709 - RNA, 22 nt, synthetic construct
  misc_feature 1..22: note = Synthetic
  source 1..22: mol_type = other RNA
cccacggccggcaacgcagaac

SEQ ID NO: 1710 - RNA, 22 nt, synthetic construct
  misc_feature 1..22: note = Synthetic
  source 1..22: mol_type = other RNA
cccgtgttctgcgttgccggcc

SEQ ID NO: 1711 - RNA, 22 nt, synthetic construct
  misc_feature 1..22: note = Synthetic
  source 1..22: mol_type = other RNA
cctccgaccctcctctcgggat

SEQ ID NO: 1712 - RNA, 22 nt, synthetic construct
  misc_feature 1..22: note = Synthetic
  source 1..22: mol_type = other RNA
cctgcacatctccgcgagacag

SEQ ID NO: 1713 - RNA, 22 nt, synthetic construct
  misc_feature 1..22: note = Synthetic
  source 1..22: mol_type = other RNA
cgcaggaggcggaaccgggttg

SEQ ID NO: 1714 - RNA, 22 nt, synthetic construct
  misc_feature 1..22: note = Synthetic
  source 1..22: mol_type = other RNA
cggctccgctcaaggggaggag

SEQ ID NO: 1715 - RNA, 22 nt, synthetic construct
  misc_feature 1..22: note = Synthetic
  source 1..22: mol_type = other RNA
cgggctgtgcggaggctaatgg

SEQ ID NO: 1716 - RNA, 22 nt, synthetic construct
  misc_feature 1..22: note = Synthetic
  source 1..22: mol_type = other RNA
tctccttcccttcctggaagac

SEQ ID NO: 1717 - RNA, 22 nt, synthetic construct
  misc_feature 1..22: note = Synthetic
  source 1..22: mol_type = other RNA
tggaagacccgaatcccgagag

SEQ ID NO: 1718 - RNA, 22 nt, synthetic construct
  misc_feature 1..22: note = Synthetic
  source 1..22: mol_type = other RNA
ttggaagccgcaggaggcggaa

SEQ ID NO: 1719 - RNA, 20 nt, synthetic construct
  misc_feature 1..20: note = Synthetic
  source 1..20: mol_type = other RNA
gaacgaactggagctgctga

SEQ ID NO: 1720 - RNA, 20 nt, synthetic construct
  misc_feature 1..20: note = Synthetic
  source 1..20: mol_type = other RNA
gaagagtttttgggaggagg

SEQ ID NO: 1721 - RNA, 20 nt, synthetic construct
  misc_feature 1..20: note = Synthetic
  source 1..20: mol_type = other RNA
gacagaaaagacagcggaac

SEQ ID NO: 1722 - RNA, 20 nt, synthetic construct
  misc_feature 1..20: note = Synthetic
  source 1..20: mol_type = other RNA
gagccctgctgctcaggtga

SEQ ID NO: 1723 - RNA, 20 nt, synthetic construct
  misc_feature 1..20: note = Synthetic
  source 1..20: mol_type = other RNA
gatggagaagagtttttggg

SEQ ID NO: 1724 - RNA, 20 nt, synthetic construct
  misc_feature 1..20: note = Synthetic
  source 1..20: mol_type = other RNA
gatggagcagctgaacgaac

SEQ ID NO: 1725 - RNA, 20 nt, synthetic construct
  misc_feature 1..20: note = Synthetic
  source 1..20: mol_type = other RNA
gcgccggcgcgttccacgtg

SEQ ID NO: 1726 - RNA, 20 nt, synthetic construct
  misc_feature 1..20: note = Synthetic
  source 1..20: mol_type = other RNA
gcggcctggcgcaggtcatt

SEQ ID NO: 1727 - RNA, 20 nt, synthetic construct
  misc_feature 1..20: note = Synthetic
  source 1..20: mol_type = other RNA
gctgatggagaagagttttt

SEQ ID NO: 1728 - RNA, 20 nt, synthetic construct
  misc_feature 1..20: note = Synthetic
  source 1..20: mol_type = other RNA
gctgccggcggagctgtgag

SEQ ID NO: 1729 - RNA, 20 nt, synthetic construct
  misc_feature 1..20: note = Synthetic
  source 1..20: mol_type = other RNA
gctgctccatcctggacgcg

SEQ ID NO: 1730 - RNA, 20 nt, synthetic construct
  misc_feature 1..20: note = Synthetic
  source 1..20: mol_type = other RNA
ggaacgcgccggcgcgggag

SEQ ID NO: 1731 - RNA, 20 nt, synthetic construct
  misc_feature 1..20: note = Synthetic
  source 1..20: mol_type = other RNA
ggagaagagtttttgggagg

SEQ ID NO: 1732 - RNA, 20 nt, synthetic construct
  misc_feature 1..20: note = Synthetic
  source 1..20: mol_type = other RNA
gggacagagccctgctgctc

SEQ ID NO: 1733 - RNA, 20 nt, synthetic construct
  misc_feature 1..20: note = Synthetic
  source 1..20: mol_type = other RNA
gggaggtttcggacacgggt

SEQ ID NO: 1734 - RNA, 20 nt, synthetic construct
  misc_feature 1..20: note = Synthetic
  source 1..20: mol_type = other RNA
gggccccacgtggaacgcgc

SEQ ID NO: 1735 - RNA, 20 nt, synthetic construct
  misc_feature 1..20: note = Synthetic
  source 1..20: mol_type = other RNA
gggcccctcacctgagcagc

SEQ ID NO: 1736 - RNA, 20 nt, synthetic construct
  misc_feature 1..20: note = Synthetic
  source 1..20: mol_type = other RNA
ggttggagtgtcaagagaga

SEQ ID NO: 1737 - RNA, 20 nt, synthetic construct
  misc_feature 1..20: note = Synthetic
  source 1..20: mol_type = other RNA
gtattcccagtcctaagcaa

SEQ ID NO: 1738 - RNA, 20 nt, synthetic construct
  misc_feature 1..20: note = Synthetic
  source 1..20: mol_type = other RNA
gtggaacgcgccggcgcggg

SEQ ID NO: 1739 - RNA, 20 nt, synthetic construct
  misc_feature 1..20: note = Synthetic
  source 1..20: mol_type = other RNA
aacccgggaggtttcggaca

SEQ ID NO: 1740 - RNA, 20 nt, synthetic construct
  misc_feature 1..20: note = Synthetic
  source 1..20: mol_type = other RNA
aacccgtgtccgaaacctcc

SEQ ID NO: 1741 - RNA, 20 nt, synthetic construct
  misc_feature 1..20: note = Synthetic
  source 1..20: mol_type = other RNA
acagaaaagacagcggaacc

SEQ ID NO: 1742 - RNA, 20 nt, synthetic construct
  misc_feature 1..20: note = Synthetic
  source 1..20: mol_type = other RNA
acccgggaggtttcggacac

SEQ ID NO: 1743 - RNA, 20 nt, synthetic construct
  misc_feature 1..20: note = Synthetic
  source 1..20: mol_type = other RNA
acccgtgtccgaaacctccc

SEQ ID NO: 1744 - RNA, 20 nt, synthetic construct
  misc_feature 1..20: note = Synthetic
  source 1..20: mol_type = other RNA
agaaaagacagcggaaccgg

SEQ ID NO: 1745 - RNA, 20 nt, synthetic construct
  misc_feature 1..20: note = Synthetic
  source 1..20: mol_type = other RNA
agtcctaagcaagggagcaa

SEQ ID NO: 1746 - RNA, 20 nt, synthetic construct
  misc_feature 1..20: note = Synthetic
  source 1..20: mol_type = other RNA
agtttgcgatccccgcgtcc

SEQ ID NO: 1747 - RNA, 20 nt, synthetic construct
  misc_feature 1..20: note = Synthetic
  source 1..20: mol_type = other RNA
cacgtggaacgcgccggcgc

SEQ ID NO: 1748 - RNA, 20 nt, synthetic construct
  misc_feature 1..20: note = Synthetic
  source 1..20: mol_type = other RNA
cagaaaagacagcggaaccg

SEQ ID NO: 1749 - RNA, 20 nt, synthetic construct
  misc_feature 1..20: note = Synthetic
  source 1..20: mol_type = other RNA
ccacgtggaacgcgccggcg

SEQ ID NO: 1750 - RNA, 20 nt, synthetic construct
  misc_feature 1..20: note = Synthetic
  source 1..20: mol_type = other RNA
ccgcgccggcgcgttccacg

SEQ ID NO: 1751 - RNA, 20 nt, synthetic construct
  misc_feature 1..20: note = Synthetic
  source 1..20: mol_type = other RNA
cgcatgcgcgcgaggtgcgc

SEQ ID NO: 1752 - RNA, 20 nt, synthetic construct
  misc_feature 1..20: note = Synthetic
  source 1..20: mol_type = other RNA
cgcgccggcgcgttccacgt

SEQ ID NO: 1753 - RNA, 20 nt, synthetic construct
  misc_feature 1..20: note = Synthetic
  source 1..20: mol_type = other RNA
cggcctggcgcaggtcattt

SEQ ID NO: 1754 - RNA, 20 nt, synthetic construct
  misc_feature 1..20: note = Synthetic
  source 1..20: mol_type = other RNA
tgcgatccccgcgtccagga

SEQ ID NO: 1755 - RNA, 20 nt, synthetic construct
  misc_feature 1..20: note = Synthetic
  source 1..20: mol_type = other RNA
tggaacgcgccggcgcggga

SEQ ID NO: 1756 - RNA, 20 nt, synthetic construct
  misc_feature 1..20: note = Synthetic
  source 1..20: mol_type = other RNA
tgtcccaaatgacctgcgcc

SEQ ID NO: 1757 - RNA, 20 nt, synthetic construct
  misc_feature 1..20: note = Synthetic
  source 1..20: mol_type = other RNA
ttcgttcagctgctccatcc

SEQ ID NO: 1758 - RNA, 20 nt, synthetic construct
  misc_feature 1..20: note = Synthetic
  source 1..20: mol_type = other RNA
ttgctcccttgcttaggact

SEQ ID NO: 1759 - RNA, 22 nt, synthetic construct
  misc_feature 1..22: note = Synthetic
  source 1..22: mol_type = other RNA
gcgcaggtcatttgggacatct

SEQ ID NO: 1760 - RNA, 22 nt, synthetic construct
  misc_feature 1..22: note = Synthetic
  source 1..22: mol_type = other RNA
gtgaacccgggaggtttcggac

SEQ ID NO: 1761 - RNA, 22 nt, synthetic construct
  misc_feature 1..22: note = Synthetic
  source 1..22: mol_type = other RNA
agacagaaaagacagcggaacc

SEQ ID NO: 1762 - RNA, 22 nt, synthetic construct
  misc_feature 1..22: note = Synthetic
  source 1..22: mol_type = other RNA
ccgggaggtttcggacacgggt

SEQ ID NO: 1763 - RNA, 22 nt, synthetic construct
  misc_feature 1..22: note = Synthetic
  source 1..22: mol_type = other RNA
cgaactggagctgctgatggag

SEQ ID NO: 1764 - RNA, 22 nt, synthetic construct
  misc_feature 1..22: note = Synthetic
  source 1..22: mol_type = other RNA
cttgcttaggactgggaataca

SEQ ID NO: 1765 - RNA, 22 nt, synthetic construct
  misc_feature 1..22: note = Synthetic
  source 1..22: mol_type = other RNA
ctttgctcccttgcttaggact

SEQ ID NO: 1766 - RNA, 22 nt, synthetic construct
  misc_feature 1..22: note = Synthetic
  source 1..22: mol_type = other RNA
tacagtttgcgatccccgcgtc

SEQ ID NO: 1767 - RNA, 22 nt, synthetic construct
  misc_feature 1..22: note = Synthetic
  source 1..22: mol_type = other RNA
tcagctgctccatcctggacgc

SEQ ID NO: 1768 - RNA, 22 nt, synthetic construct
  misc_feature 1..22: note = Synthetic
  source 1..22: mol_type = other RNA
tccaacccgtgtccgaaacctc

SEQ ID NO: 1769 - RNA, 20 nt, synthetic construct
  misc_feature 1..20: note = Synthetic
  source 1..20: mol_type = other RNA
gaacccggaagtgagatgca

SEQ ID NO: 1770 - RNA, 20 nt, synthetic construct
  misc_feature 1..20: note = Synthetic
  source 1..20: mol_type = other RNA
gagccaatcctgagcaggct

SEQ ID NO: 1771 - RNA, 20 nt, synthetic construct
  misc_feature 1..20: note = Synthetic
  source 1..20: mol_type = other RNA
gattggctcctgcgtgaggg

SEQ ID NO: 1772 - RNA, 20 nt, synthetic construct
  misc_feature 1..20: note = Synthetic
  source 1..20: mol_type = other RNA
gccgccttgcatctcacttc

SEQ ID NO: 1773 - RNA, 20 nt, synthetic construct
  misc_feature 1..20: note = Synthetic
  source 1..20: mol_type = other RNA
gccgtaaacctgaattccgc

SEQ ID NO: 1774 - RNA, 20 nt, synthetic construct
  misc_feature 1..20: note = Synthetic
  source 1..20: mol_type = other RNA
gcgaggccccgccctcacgc

SEQ ID NO: 1775 - RNA, 20 nt, synthetic construct
  misc_feature 1..20: note = Synthetic
  source 1..20: mol_type = other RNA
ggccgtaaacctgaattccg

SEQ ID NO: 1776 - RNA, 20 nt, synthetic construct
  misc_feature 1..20: note = Synthetic
  source 1..20: mol_type = other RNA
ggctaccgcacgcagtgagg

SEQ ID NO: 1777 - RNA, 20 nt, synthetic construct
  misc_feature 1..20: note = Synthetic
  source 1..20: mol_type = other RNA
gggcggggaaagtagcggcg

SEQ ID NO: 1778 - RNA, 20 nt, synthetic construct
  misc_feature 1..20: note = Synthetic
  source 1..20: mol_type = other RNA
gtagccaatgagagccgaac

SEQ ID NO: 1779 - RNA, 20 nt, synthetic construct
  misc_feature 1..20: note = Synthetic
  source 1..20: mol_type = other RNA
gttcgtctcctagcctgctc

SEQ ID NO: 1780 - RNA, 20 nt, synthetic construct
  misc_feature 1..20: note = Synthetic
  source 1..20: mol_type = other RNA
gtttctctcgcgacacttca

SEQ ID NO: 1781 - RNA, 20 nt, synthetic construct
  misc_feature 1..20: note = Synthetic
  source 1..20: mol_type = other RNA
aagtccagttcggctctcat

SEQ ID NO: 1782 - RNA, 20 nt, synthetic construct
  misc_feature 1..20: note = Synthetic
  source 1..20: mol_type = other RNA
accgcacgcagtgagggggc

SEQ ID NO: 1783 - RNA, 20 nt, synthetic construct
  misc_feature 1..20: note = Synthetic
  source 1..20: mol_type = other RNA
acggacgccgttctctcccg

SEQ ID NO: 1784 - RNA, 20 nt, synthetic construct
  misc_feature 1..20: note = Synthetic
  source 1..20: mol_type = other RNA
attggctaccgcacgcagtg

SEQ ID NO: 1785 - RNA, 20 nt, synthetic construct
  misc_feature 1..20: note = Synthetic
  source 1..20: mol_type = other RNA
attggctcctgcgtgagggc

SEQ ID NO: 1786 - RNA, 20 nt, synthetic construct
  misc_feature 1..20: note = Synthetic
  source 1..20: mol_type = other RNA
caggattggctcctgcgtga

SEQ ID NO: 1787 - RNA, 20 nt, synthetic construct
  misc_feature 1..20: note = Synthetic
  source 1..20: mol_type = other RNA
ccccgccccctcactgcgtg

SEQ ID NO: 1788 - RNA, 20 nt, synthetic construct
  misc_feature 1..20: note = Synthetic
  source 1..20: mol_type = other RNA
ccgcacgcagtgagggggcg

SEQ ID NO: 1789 - RNA, 20 nt, synthetic construct
  misc_feature 1..20: note = Synthetic
  source 1..20: mol_type = other RNA
ccgccttgcatctcacttcc

SEQ ID NO: 1790 - RNA, 20 nt, synthetic construct
  misc_feature 1..20: note = Synthetic
  source 1..20: mol_type = other RNA
cgcaggagccaatcctgagc

SEQ ID NO: 1791 - RNA, 20 nt, synthetic construct
  misc_feature 1..20: note = Synthetic
  source 1..20: mol_type = other RNA
cgttctctcccgcggaattc

SEQ ID NO: 1792 - RNA, 20 nt, synthetic construct
  misc_feature 1..20: note = Synthetic
  source 1..20: mol_type = other RNA
ctgaattccgcgggagagaa

SEQ ID NO: 1793 - RNA, 20 nt, synthetic construct
  misc_feature 1..20: note = Synthetic
  source 1..20: mol_type = other RNA
taccgcacgcagtgaggggg

SEQ ID NO: 1794 - RNA, 20 nt, synthetic construct
  misc_feature 1..20: note = Synthetic
  source 1..20: mol_type = other RNA
tagatgcttcaagtccagtt

SEQ ID NO: 1795 - RNA, 20 nt, synthetic construct
  misc_feature 1..20: note = Synthetic
  source 1..20: mol_type = other RNA
tcaggattggctcctgcgtg

SEQ ID NO: 1796 - RNA, 20 nt, synthetic construct
  misc_feature 1..20: note = Synthetic
  source 1..20: mol_type = other RNA
tcccgcggaattcaggttta

SEQ ID NO: 1797 - RNA, 20 nt, synthetic construct
  misc_feature 1..20: note = Synthetic
  source 1..20: mol_type = other RNA
tctcctagcctgctcaggat

SEQ ID NO: 1798 - RNA, 20 nt, synthetic construct
  misc_feature 1..20: note = Synthetic
  source 1..20: mol_type = other RNA
tggctaccgcacgcagtgag

SEQ ID NO: 1799 - RNA, 20 nt, synthetic construct
  misc_feature 1..20: note = Synthetic
  source 1..20: mol_type = other RNA
ttggctaccgcacgcagtga

SEQ ID NO: 1800 - RNA, 20 nt, synthetic construct
  misc_feature 1..20: note = Synthetic
  source 1..20: mol_type = other RNA
ttggctcctgcgtgagggcg

SEQ ID NO: 1801 - RNA, 22 nt, synthetic construct
  misc_feature 1..22: note = Synthetic
  source 1..22: mol_type = other RNA
gagaacccgcagggccgtaaac

SEQ ID NO: 1802 - RNA, 22 nt, synthetic construct
  misc_feature 1..22: note = Synthetic
  source 1..22: mol_type = other RNA
aaacggacgccgttctctcccg

SEQ ID NO: 1803 - RNA, 22 nt, synthetic construct
  misc_feature 1..22: note = Synthetic
  source 1..22: mol_type = other RNA
atcgccgccttgcatctcactt

SEQ ID NO: 1804 - RNA, 22 nt, synthetic construct
  misc_feature 1..22: note = Synthetic
  source 1..22: mol_type = other RNA
cagaccgtgttgttttcttttc

SEQ ID NO: 1805 - RNA, 22 nt, synthetic construct
  misc_feature 1..22: note = Synthetic
  source 1..22: mol_type = other RNA
cggaattcaggtttacggccct

SEQ ID NO: 1806 - RNA, 22 nt, synthetic construct
  misc_feature 1..22: note = Synthetic
  source 1..22: mol_type = other RNA
cgggttcgtctcctagcctgct

SEQ ID NO: 1807 - RNA, 22 nt, synthetic construct
  misc_feature 1..22: note = Synthetic
  source 1..22: mol_type = other RNA
tccgtttctctcgcgacacttc

SEQ ID NO: 1808 - RNA, 20 nt, synthetic construct
  misc_feature 1..20: note = Synthetic
  source 1..20: mol_type = other RNA
gaagcagagggctaggtgct

SEQ ID NO: 1809 - RNA, 20 nt, synthetic construct
  misc_feature 1..20: note = Synthetic
  source 1..20: mol_type = other RNA
gagagcggcgtggacgcgtg

SEQ ID NO: 1810 - RNA, 20 nt, synthetic construct
  misc_feature 1..20: note = Synthetic
  source 1..20: mol_type = other RNA
gcagctccgacttccgggtg

SEQ ID NO: 1811 - RNA, 20 nt, synthetic construct
  misc_feature 1..20: note = Synthetic
  source 1..20: mol_type = other RNA
gccgctctcctggggcacgc

SEQ ID NO: 1812 - RNA, 20 nt, synthetic construct
  misc_feature 1..20: note = Synthetic
  source 1..20: mol_type = other RNA
gccgggaaatcagagtcccg

SEQ ID NO: 1813 - RNA, 20 nt, synthetic construct
  misc_feature 1..20: note = Synthetic
  source 1..20: mol_type = other RNA
gccgtaccgcacccggaagt

SEQ ID NO: 1814 - RNA, 20 nt, synthetic construct
  misc_feature 1..20: note = Synthetic
  source 1..20: mol_type = other RNA
gcggggtcgcattgtggcta

SEQ ID NO: 1815 - RNA, 20 nt, synthetic construct
  misc_feature 1..20: note = Synthetic
  source 1..20: mol_type = other RNA
gcggttgcggggtcgcattg

SEQ ID NO: 1816 - RNA, 20 nt, synthetic construct
  misc_feature 1..20: note = Synthetic
  source 1..20: mol_type = other RNA
gcgtccacgccgctctcctg

SEQ ID NO: 1817 - RNA, 20 nt, synthetic construct
  misc_feature 1..20: note = Synthetic
  source 1..20: mol_type = other RNA
gcgtgcgcagctccgacttc

SEQ ID NO: 1818 - RNA, 20 nt, synthetic construct
  misc_feature 1..20: note = Synthetic
  source 1..20: mol_type = other RNA
gctgtgagtgcgcggttgcg

SEQ ID NO: 1819 - RNA, 20 nt, synthetic construct
  misc_feature 1..20: note = Synthetic
  source 1..20: mol_type = other RNA
ggcaggaagctgtgagtgcg

SEQ ID NO: 1820 - RNA, 20 nt, synthetic construct
  misc_feature 1..20: note = Synthetic
  source 1..20: mol_type = other RNA
ggcccacgtgatccgcaggg

SEQ ID NO: 1821 - RNA, 20 nt, synthetic construct
  misc_feature 1..20: note = Synthetic
  source 1..20: mol_type = other RNA
ggccgccctgcggatcacgt

SEQ ID NO: 1822 - RNA, 20 nt, synthetic construct
  misc_feature 1..20: note = Synthetic
  source 1..20: mol_type = other RNA
ggtgcggtacggcgaagcag

SEQ ID NO: 1823 - RNA, 20 nt, synthetic construct
  misc_feature 1..20: note = Synthetic
  source 1..20: mol_type = other RNA
ggtgctgggtgctgttgcca

SEQ ID NO: 1824 - RNA, 20 nt, synthetic construct
  misc_feature 1..20: note = Synthetic
  source 1..20: mol_type = other RNA
ggtgctgttgccaggggcag

SEQ ID NO: 1825 - RNA, 20 nt, synthetic construct
  misc_feature 1..20: note = Synthetic
  source 1..20: mol_type = other RNA
gtacggcgaagcagagggct

SEQ ID NO: 1826 - RNA, 20 nt, synthetic construct
  misc_feature 1..20: note = Synthetic
  source 1..20: mol_type = other RNA
gtgcggtacggcgaagcaga

SEQ ID NO: 1827 - RNA, 20 nt, synthetic construct
  misc_feature 1..20: note = Synthetic
  source 1..20: mol_type = other RNA
gtggacgcgtgcgggcctag

SEQ ID NO: 1828 - RNA, 20 nt, synthetic construct
  misc_feature 1..20: note = Synthetic
  source 1..20: mol_type = other RNA
aagctgtgagtgcgcggttg

SEQ ID NO: 1829 - RNA, 20 nt, synthetic construct
  misc_feature 1..20: note = Synthetic
  source 1..20: mol_type = other RNA
accgcgggactctgatttcc

SEQ ID NO: 1830 - RNA, 20 nt, synthetic construct
  misc_feature 1..20: note = Synthetic
  source 1..20: mol_type = other RNA
acgcgtccacgccgctctcc

SEQ ID NO: 1831 - RNA, 20 nt, synthetic construct
  misc_feature 1..20: note = Synthetic
  source 1..20: mol_type = other RNA
agagcggcgtggacgcgtgc

SEQ ID NO: 1832 - RNA, 20 nt, synthetic construct
  misc_feature 1..20: note = Synthetic
  source 1..20: mol_type = other RNA
agaggcccacgtgatccgca

SEQ ID NO: 1833 - RNA, 20 nt, synthetic construct
  misc_feature 1..20: note = Synthetic
  source 1..20: mol_type = other RNA
agctgtgagtgcgcggttgc

SEQ ID NO: 1834 - RNA, 20 nt, synthetic construct
  misc_feature 1..20: note = Synthetic
  source 1..20: mol_type = other RNA
atccgcagggcggccgaggc

SEQ ID NO: 1835 - RNA, 20 nt, synthetic construct
  misc_feature 1..20: note = Synthetic
  source 1..20: mol_type = other RNA
cccggcgtgccccaggagag

SEQ ID NO: 1836 - RNA, 20 nt, synthetic construct
  misc_feature 1..20: note = Synthetic
  source 1..20: mol_type = other RNA
ccgctctcctggggcacgcc

SEQ ID NO: 1837 - RNA, 20 nt, synthetic construct
  misc_feature 1..20: note = Synthetic
  source 1..20: mol_type = other RNA
cgaagcagagggctaggtgc

SEQ ID NO: 1838 - RNA, 20 nt, synthetic construct
  misc_feature 1..20: note = Synthetic
  source 1..20: mol_type = other RNA
cggagctgcgcacgcaccgc

SEQ ID NO: 1839 - RNA, 20 nt, synthetic construct
  misc_feature 1..20: note = Synthetic
  source 1..20: mol_type = other RNA
cggccgccctgcggatcacg

SEQ ID NO: 1840 - RNA, 20 nt, synthetic construct
  misc_feature 1..20: note = Synthetic
  source 1..20: mol_type = other RNA
cgtgatccgcagggcggccg

SEQ ID NO: 1841 - RNA, 20 nt, synthetic construct
  misc_feature 1..20: note = Synthetic
  source 1..20: mol_type = other RNA
cgtgcgcagctccgacttcc

SEQ ID NO: 1842 - RNA, 20 nt, synthetic construct
  misc_feature 1..20: note = Synthetic
  source 1..20: mol_type = other RNA
ctgatttcccggcgtgcccc

SEQ ID NO: 1843 - RNA, 20 nt, synthetic construct
  misc_feature 1..20: note = Synthetic
  source 1..20: mol_type = other RNA
ctgcttcgccgtaccgcacc

SEQ ID NO: 1844 - RNA, 20 nt, synthetic construct
  misc_feature 1..20: note = Synthetic
  source 1..20: mol_type = other RNA
tagaggcccacgtgatccgc

SEQ ID NO: 1845 - RNA, 20 nt, synthetic construct
  misc_feature 1..20: note = Synthetic
  source 1..20: mol_type = other RNA
tccgacttccgggtgcggta

SEQ ID NO: 1846 - RNA, 20 nt, synthetic construct
  misc_feature 1..20: note = Synthetic
  source 1..20: mol_type = other RNA
tcggagctgcgcacgcaccg

SEQ ID NO: 1847 - RNA, 20 nt, synthetic construct
  misc_feature 1..20: note = Synthetic
  source 1..20: mol_type = other RNA
tgcggatcacgtgggcctct

SEQ ID NO: 1848 - RNA, 22 nt, synthetic construct
  misc_feature 1..22: note = Synthetic
  source 1..22: mol_type = other RNA
ggaagctgtgagtgcgcggttg

SEQ ID NO: 1849 - RNA, 22 nt, synthetic construct
  misc_feature 1..22: note = Synthetic
  source 1..22: mol_type = other RNA
ggtgcgtgcgcagctccgactt

SEQ ID NO: 1850 - RNA, 22 nt, synthetic construct
  misc_feature 1..22: note = Synthetic
  source 1..22: mol_type = other RNA
agcttcctgcctcggccgccct

SEQ ID NO: 1851 - RNA, 22 nt, synthetic construct
  misc_feature 1..22: note = Synthetic
  source 1..22: mol_type = other RNA
agggcggccgaggcaggaagct

SEQ ID NO: 1852 - RNA, 22 nt, synthetic construct
  misc_feature 1..22: note = Synthetic
  source 1..22: mol_type = other RNA
cggcgaagcagagggctaggtg

SEQ ID NO: 1853 - RNA, 22 nt, synthetic construct
  misc_feature 1..22: note = Synthetic
  source 1..22: mol_type = other RNA
ctcctggggcacgccgggaaat

SEQ ID NO: 1854 - RNA, 20 nt, synthetic construct
  misc_feature 1..20: note = Synthetic
  source 1..20: mol_type = other RNA
gagcgcggatacggcgcctg

SEQ ID NO: 1855 - RNA, 20 nt, synthetic construct
  misc_feature 1..20: note = Synthetic
  source 1..20: mol_type = other RNA
gatgaggcgggagtgcgact

SEQ ID NO: 1856 - RNA, 20 nt, synthetic construct
  misc_feature 1..20: note = Synthetic
  source 1..20: mol_type = other RNA
gcaggctgccttggatgagg

SEQ ID NO: 1857 - RNA, 20 nt, synthetic construct
  misc_feature 1..20: note = Synthetic
  source 1..20: mol_type = other RNA
gcggatacggcgcctgcggt

SEQ ID NO: 1858 - RNA, 20 nt, synthetic construct
  misc_feature 1..20: note = Synthetic
  source 1..20: mol_type = other RNA
ggcgcttgcccgccacctgg

SEQ ID NO: 1859 - RNA, 20 nt, synthetic construct
  misc_feature 1..20: note = Synthetic
  source 1..20: mol_type = other RNA
gggagccacgcaggctgcct

SEQ ID NO: 1860 - RNA, 20 nt, synthetic construct
  misc_feature 1..20: note = Synthetic
  source 1..20: mol_type = other RNA
gttaaaagggtatgtttcta

SEQ ID NO: 1861 - RNA, 20 nt, synthetic construct
  misc_feature 1..20: note = Synthetic
  source 1..20: mol_type = other RNA
acggcgcctgcggtcggcat

SEQ ID NO: 1862 - RNA, 20 nt, synthetic construct
  misc_feature 1..20: note = Synthetic
  source 1..20: mol_type = other RNA
atgaggcgggagtgcgactt

SEQ ID NO: 1863 - RNA, 20 nt, synthetic construct
  misc_feature 1..20: note = Synthetic
  source 1..20: mol_type = other RNA
cacgcaggctgccttggatg

SEQ ID NO: 1864 - RNA, 20 nt, synthetic construct
  misc_feature 1..20: note = Synthetic
  source 1..20: mol_type = other RNA
caggctgccttggatgaggc

SEQ ID NO: 1865 - RNA, 20 nt, synthetic construct
  misc_feature 1..20: note = Synthetic
  source 1..20: mol_type = other RNA
ccggagcccatgccgaccgc

SEQ ID NO: 1866 - RNA, 20 nt, synthetic construct
  misc_feature 1..20: note = Synthetic
  source 1..20: mol_type = other RNA
cctgcggtcggcatgggctc

SEQ ID NO: 1867 - RNA, 20 nt, synthetic construct
  misc_feature 1..20: note = Synthetic
  source 1..20: mol_type = other RNA
ctaaggtgtcgctgaatgta

SEQ ID NO: 1868 - RNA, 20 nt, synthetic construct
  misc_feature 1..20: note = Synthetic
  source 1..20: mol_type = other RNA
ctcatccaaggcagcctgcg

SEQ ID NO: 1869 - RNA, 20 nt, synthetic construct
  misc_feature 1..20: note = Synthetic
  source 1..20: mol_type = other RNA
ctgcggtcggcatgggctcc

SEQ ID NO: 1870 - RNA, 20 nt, synthetic construct
  misc_feature 1..20: note = Synthetic
  source 1..20: mol_type = other RNA
ctgctagacgagcgcggata

SEQ ID NO: 1871 - RNA, 20 nt, synthetic construct
  misc_feature 1..20: note = Synthetic
  source 1..20: mol_type = other RNA
ctgttccttttccaaccacc

SEQ ID NO: 1872 - RNA, 20 nt, synthetic construct
  misc_feature 1..20: note = Synthetic
  source 1..20: mol_type = other RNA
cttgcccgccacctggtggt

SEQ ID NO: 1873 - RNA, 20 nt, synthetic construct
  misc_feature 1..20: note = Synthetic
  source 1..20: mol_type = other RNA
cttttccaaccaccaggtgg

SEQ ID NO: 1874 - RNA, 20 nt, synthetic construct
  misc_feature 1..20: note = Synthetic
  source 1..20: mol_type = other RNA
tacggcgcctgcggtcggca

SEQ ID NO: 1875 - RNA, 20 nt, synthetic construct
  misc_feature 1..20: note = Synthetic
  source 1..20: mol_type = other RNA
tcccgggagcgcgcacgtcc

SEQ ID NO: 1876 - RNA, 20 nt, synthetic construct
  misc_feature 1..20: note = Synthetic
  source 1..20: mol_type = other RNA
tccgggacgtgcgcgctccc

SEQ ID NO: 1877 - RNA, 20 nt, synthetic construct
  misc_feature 1..20: note = Synthetic
  source 1..20: mol_type = other RNA
tcgcactcccgcctcatcca

SEQ ID NO: 1878 - RNA, 20 nt, synthetic construct
  misc_feature 1..20: note = Synthetic
  source 1..20: mol_type = other RNA
tgaaatgtgctgcgttaaaa

SEQ ID NO: 1879 - RNA, 20 nt, synthetic construct
  misc_feature 1..20: note = Synthetic
  source 1..20: mol_type = other RNA
ttgaaatgtgctgcgttaaa

SEQ ID NO: 1880 - RNA, 20 nt, synthetic construct
  misc_feature 1..20: note = Synthetic
  source 1..20: mol_type = other RNA
ttgggcgcttgcccgccacc

SEQ ID NO: 1881 - RNA, 22 nt, synthetic construct
  misc_feature 1..22: note = Synthetic
  source 1..22: mol_type = other RNA
gtattgaaatgtgctgcgttaa

SEQ ID NO: 1882 - RNA, 22 nt, synthetic construct
  misc_feature 1..22: note = Synthetic
  source 1..22: mol_type = other RNA
agggtatgtttctaaggtgtcg

SEQ ID NO: 1883 - RNA, 22 nt, synthetic construct
  misc_feature 1..22: note = Synthetic
  source 1..22: mol_type = other RNA
cccgggagccacgcaggctgcc

SEQ ID NO: 1884 - RNA, 22 nt, synthetic construct
  misc_feature 1..22: note = Synthetic
  source 1..22: mol_type = other RNA
cgcaggctgccttggatgaggc

SEQ ID NO: 1885 - RNA, 20 nt, synthetic construct
  misc_feature 1..20: note = Synthetic
  source 1..20: mol_type = other RNA
gaaacagcttagtgggtgtg

SEQ ID NO: 1886 - RNA, 20 nt, synthetic construct
  misc_feature 1..20: note = Synthetic
  source 1..20: mol_type = other RNA
gaggcgggaaacagcttagt

SEQ ID NO: 1887 - RNA, 20 nt, synthetic construct
  misc_feature 1..20: note = Synthetic
  source 1..20: mol_type = other RNA
gcagctgagtaaacacagaa

SEQ ID NO: 1888 - RNA, 20 nt, synthetic construct
  misc_feature 1..20: note = Synthetic
  source 1..20: mol_type = other RNA
gcccagcttcccgcgcacgc

SEQ ID NO: 1889 - RNA, 20 nt, synthetic construct
  misc_feature 1..20: note = Synthetic
  source 1..20: mol_type = other RNA
gccgctcgggggacgtggga

SEQ ID NO: 1890 - RNA, 20 nt, synthetic construct
  misc_feature 1..20: note = Synthetic
  source 1..20: mol_type = other RNA
gccgtggccggacgccgctc

SEQ ID NO: 1891 - RNA, 20 nt, synthetic construct
  misc_feature 1..20: note = Synthetic
  source 1..20: mol_type = other RNA
gctaaagtcaccagcgtgcg

SEQ ID NO: 1892 - RNA, 20 nt, synthetic construct
  misc_feature 1..20: note = Synthetic
  source 1..20: mol_type = other RNA
gctgcaaggcttgaagcccc

SEQ ID NO: 1893 - RNA, 20 nt, synthetic construct
  misc_feature 1..20: note = Synthetic
  source 1..20: mol_type = other RNA
ggaaacagcttagtgggtgt

SEQ ID NO: 1894 - RNA, 20 nt, synthetic construct
  misc_feature 1..20: note = Synthetic
  source 1..20: mol_type = other RNA
ggacgccgctcgggggacgt

SEQ ID NO: 1895 - RNA, 20 nt, synthetic construct
  misc_feature 1..20: note = Synthetic
  source 1..20: mol_type = other RNA
ggaggcgggaaacagcttag

SEQ ID NO: 1896 - RNA, 20 nt, synthetic construct
  misc_feature 1..20: note = Synthetic
  source 1..20: mol_type = other RNA
gggaaacagcttagtgggtg

SEQ ID NO: 1897 - RNA, 20 nt, synthetic construct
  misc_feature 1..20: note = Synthetic
  source 1..20: mol_type = other RNA
gggccgcgtctgcttatgat

SEQ ID NO: 1898 - RNA, 20 nt, synthetic construct
  misc_feature 1..20: note = Synthetic
  source 1..20: mol_type = other RNA
ggggacgtgggaggggaggc

SEQ ID NO: 1899 - RNA, 20 nt, synthetic construct
  misc_feature 1..20: note = Synthetic
  source 1..20: mol_type = other RNA
gggggacgtgggaggggagg

SEQ ID NO: 1900 - RNA, 20 nt, synthetic construct
  misc_feature 1..20: note = Synthetic
  source 1..20: mol_type = other RNA
ggtggggtgtatgcaagggt

SEQ ID NO: 1901 - RNA, 20 nt, synthetic construct
  misc_feature 1..20: note = Synthetic
  source 1..20: mol_type = other RNA
accagcgtgcgcgggaagct

SEQ ID NO: 1902 - RNA, 20 nt, synthetic construct
  misc_feature 1..20: note = Synthetic
  source 1..20: mol_type = other RNA
agggctgcgtttcggtgggt

SEQ ID NO: 1903 - RNA, 20 nt, synthetic construct
  misc_feature 1..20: note = Synthetic
  source 1..20: mol_type = other RNA
atgcctgcgcctaggtcgcg

SEQ ID NO: 1904 - RNA, 20 nt, synthetic construct
  misc_feature 1..20: note = Synthetic
  source 1..20: mol_type = other RNA
caaccaatcataagcagacg

SEQ ID NO: 1905 - RNA, 20 nt, synthetic construct
  misc_feature 1..20: note = Synthetic
  source 1..20: mol_type = other RNA
cacgtcccccgagcggcgtc

SEQ ID NO: 1906 - RNA, 20 nt, synthetic construct
  misc_feature 1..20: note = Synthetic
  source 1..20: mol_type = other RNA
cagggctgcgtttcggtggg

SEQ ID NO: 1907 - RNA, 20 nt, synthetic construct
  misc_feature 1..20: note = Synthetic
  source 1..20: mol_type = other RNA
ccccgagcggcgtccggcca

SEQ ID NO: 1908 - RNA, 20 nt, synthetic construct
  misc_feature 1..20: note = Synthetic
  source 1..20: mol_type = other RNA
ccgctcgggggacgtgggag

SEQ ID NO: 1909 - RNA, 20 nt, synthetic construct
  misc_feature 1..20: note = Synthetic
  source 1..20: mol_type = other RNA
ccgtggccggacgccgctcg

SEQ ID NO: 1910 - RNA, 20 nt, synthetic construct
  misc_feature 1..20: note = Synthetic
  source 1..20: mol_type = other RNA
cgccgtggccggacgccgct

SEQ ID NO: 1911 - RNA, 20 nt, synthetic construct
  misc_feature 1..20: note = Synthetic
  source 1..20: mol_type = other RNA
cgtggccggacgccgctcgg

SEQ ID NO: 1912 - RNA, 20 nt, synthetic construct
  misc_feature 1..20: note = Synthetic
  source 1..20: mol_type = other RNA
ctaaagtcaccagcgtgcgc

SEQ ID NO: 1913 - RNA, 20 nt, synthetic construct
  misc_feature 1..20: note = Synthetic
  source 1..20: mol_type = other RNA
ctactaaggatgcgcgtctg

SEQ ID NO: 1914 - RNA, 20 nt, synthetic construct
  misc_feature 1..20: note = Synthetic
  source 1..20: mol_type = other RNA
ctgattgggtgtggtcgccg

SEQ ID NO: 1915 - RNA, 20 nt, synthetic construct
  misc_feature 1..20: note = Synthetic
  source 1..20: mol_type = other RNA
ctgcttatgattggttgccg

SEQ ID NO: 1916 - RNA, 20 nt, synthetic construct
  misc_feature 1..20: note = Synthetic
  source 1..20: mol_type = other RNA
tactaaggatgcgcgtctgc

SEQ ID NO: 1917 - RNA, 20 nt, synthetic construct
  misc_feature 1..20: note = Synthetic
  source 1..20: mol_type = other RNA
tactgcgcatgcctgcgcct

SEQ ID NO: 1918 - RNA, 20 nt, synthetic construct
  misc_feature 1..20: note = Synthetic
  source 1..20: mol_type = other RNA
tgcgggtttccgcgcgacct

SEQ ID NO: 1919 - RNA, 20 nt, synthetic construct
  misc_feature 1..20: note = Synthetic
  source 1..20: mol_type = other RNA
ttgggtgtggtcgccgtggc

SEQ ID NO: 1920 - RNA, 20 nt, synthetic construct
  misc_feature 1..20: note = Synthetic
  source 1..20: mol_type = other RNA
tttccgcgcgacctaggcgc

SEQ ID NO: 1921 - RNA, 22 nt, synthetic construct
  misc_feature 1..22: note = Synthetic
  source 1..22: mol_type = other RNA
gaaacgcagccctggaagctga

SEQ ID NO: 1922 - RNA, 22 nt, synthetic construct
  misc_feature 1..22: note = Synthetic
  source 1..22: mol_type = other RNA
gcgggaaacagcttagtgggtg

SEQ ID NO: 1923 - RNA, 22 nt, synthetic construct
  misc_feature 1..22: note = Synthetic
  source 1..22: mol_type = other RNA
gctctactaaggatgcgcgtct

SEQ ID NO: 1924 - RNA, 22 nt, synthetic construct
  misc_feature 1..22: note = Synthetic
  source 1..22: mol_type = other RNA
aaacacagaaaggagctctact

SEQ ID NO: 1925 - RNA, 22 nt, synthetic construct
  misc_feature 1..22: note = Synthetic
  source 1..22: mol_type = other RNA
agcccctgggtggggtgtatgc

SEQ ID NO: 1926 - RNA, 22 nt, synthetic construct
  misc_feature 1..22: note = Synthetic
  source 1..22: mol_type = other RNA
aggggaggcgggaaacagctta

SEQ ID NO: 1927 - RNA, 22 nt, synthetic construct
  misc_feature 1..22: note = Synthetic
  source 1..22: mol_type = other RNA
cagcttccagggctgcgtttcg

SEQ ID NO: 1928 - RNA, 22 nt, synthetic construct
  misc_feature 1..22: note = Synthetic
  source 1..22: mol_type = other RNA
ccagggctgcgtttcggtgggt

SEQ ID NO: 1929 - RNA, 22 nt, synthetic construct
  misc_feature 1..22: note = Synthetic
  source 1..22: mol_type = other RNA
ccaggggcttcaagccttgcag

SEQ ID NO: 1930 - RNA, 22 nt, synthetic construct
  misc_feature 1..22: note = Synthetic
  source 1..22: mol_type = other RNA
tcagctgcaaggcttgaagccc

SEQ ID NO: 1931 - RNA, 22 nt, synthetic construct
  misc_feature 1..22: note = Synthetic
  source 1..22: mol_type = other RNA
tgcaaggcttgaagcccctggg

SEQ ID NO: 1932 - RNA, 20 nt, synthetic construct
  misc_feature 1..20: note = Synthetic
  source 1..20: mol_type = other RNA
gaccctgcgtgcgccggggc

SEQ ID NO: 1933 - RNA, 20 nt, synthetic construct
  misc_feature 1..20: note = Synthetic
  source 1..20: mol_type = other RNA
gagacatggcagggcaagga

SEQ ID NO: 1934 - RNA, 20 nt, synthetic construct
  misc_feature 1..20: note = Synthetic
  source 1..20: mol_type = other RNA
gaggccccgcccccccgccc

SEQ ID NO: 1935 - RNA, 20 nt, synthetic construct
  misc_feature 1..20: note = Synthetic
  source 1..20: mol_type = other RNA
gcagggcaaggatggcagcc

SEQ ID NO: 1936 - RNA, 20 nt, synthetic construct
  misc_feature 1..20: note = Synthetic
  source 1..20: mol_type = other RNA
gccgcgaccctgcgtgcgcc

SEQ ID NO: 1937 - RNA, 20 nt, synthetic construct
  misc_feature 1..20: note = Synthetic
  source 1..20: mol_type = other RNA
gcctgcacaaatggggacga

SEQ ID NO: 1938 - RNA, 20 nt, synthetic construct
  misc_feature 1..20: note = Synthetic
  source 1..20: mol_type = other RNA
gcgggctcgcgctcctcgcc

SEQ ID NO: 1939 - RNA, 20 nt, synthetic construct
  misc_feature 1..20: note = Synthetic
  source 1..20: mol_type = other RNA
gctcgcgcccgcagacgcct

SEQ ID NO: 1940 - RNA, 20 nt, synthetic construct
  misc_feature 1..20: note = Synthetic
  source 1..20: mol_type = other RNA
gcttccggcgagacatggca

SEQ ID NO: 1941 - RNA, 20 nt, synthetic construct
  misc_feature 1..20: note = Synthetic
  source 1..20: mol_type = other RNA
ggcagcccggcggcagggcc

SEQ ID NO: 1942 - RNA, 20 nt, synthetic construct
  misc_feature 1..20: note = Synthetic
  source 1..20: mol_type = other RNA
ggcttccggcgagacatggc

SEQ ID NO: 1943 - RNA, 20 nt, synthetic construct
  misc_feature 1..20: note = Synthetic
  source 1..20: mol_type = other RNA
gggcaaggatggcagcccgg

SEQ ID NO: 1944 - RNA, 20 nt, synthetic construct
  misc_feature 1..20: note = Synthetic
  source 1..20: mol_type = other RNA
gggcctcgcctgcacaaatg

SEQ ID NO: 1945 - RNA, 20 nt, synthetic construct
  misc_feature 1..20: note = Synthetic
  source 1..20: mol_type = other RNA
ggggcctcgcctgcacaaat

SEQ ID NO: 1946 - RNA, 20 nt, synthetic construct
  misc_feature 1..20: note = Synthetic
  source 1..20: mol_type = other RNA
gtctcgccggaagcctgcgt

SEQ ID NO: 1947 - RNA, 20 nt, synthetic construct
  misc_feature 1..20: note = Synthetic
  source 1..20: mol_type = other RNA
gtgcgccggggcgggggggc

SEQ ID NO: 1948 - RNA, 20 nt, synthetic construct
  misc_feature 1..20: note = Synthetic
  source 1..20: mol_type = other RNA
aaggatggcagcccggcggc

SEQ ID NO: 1949 - RNA, 20 nt, synthetic construct
  misc_feature 1..20: note = Synthetic
  source 1..20: mol_type = other RNA
acgcctgggaactgcggccg

SEQ ID NO: 1950 - RNA, 20 nt, synthetic construct
  misc_feature 1..20: note = Synthetic
  source 1..20: mol_type = other RNA
aggatggcagcccggcggca

SEQ ID NO: 1951 - RNA, 20 nt, synthetic construct
  misc_feature 1..20: note = Synthetic
  source 1..20: mol_type = other RNA
caaatggggacgaggggggc

SEQ ID NO: 1952 - RNA, 20 nt, synthetic construct
  misc_feature 1..20: note = Synthetic
  source 1..20: mol_type = other RNA
ccccggcgcacgcagggtcg

SEQ ID NO: 1953 - RNA, 20 nt, synthetic construct
  misc_feature 1..20: note = Synthetic
  source 1..20: mol_type = other RNA
ccgcagacgcctgggaactg

SEQ ID NO: 1954 - RNA, 20 nt, synthetic construct
  misc_feature 1..20: note = Synthetic
  source 1..20: mol_type = other RNA
ccgcagttcccaggcgtctg

SEQ ID NO: 1955 - RNA, 20 nt, synthetic construct
  misc_feature 1..20: note = Synthetic
  source 1..20: mol_type = other RNA
ccgcgaccctgcgtgcgccg

SEQ ID NO: 1956 - RNA, 20 nt, synthetic construct
  misc_feature 1..20: note = Synthetic
  source 1..20: mol_type = other RNA
cctgcacaaatggggacgag

SEQ ID NO: 1957 - RNA, 20 nt, synthetic construct
  misc_feature 1..20: note = Synthetic
  source 1..20: mol_type = other RNA
cgaccctgcgtgcgccgggg

SEQ ID NO: 1958 - RNA, 20 nt, synthetic construct
  misc_feature 1..20: note = Synthetic
  source 1..20: mol_type = other RNA
cgcaggcttccggcgagaca

SEQ ID NO: 1959 - RNA, 20 nt, synthetic construct
  misc_feature 1..20: note = Synthetic
  source 1..20: mol_type = other RNA
cgcagttcccaggcgtctgc

SEQ ID NO: 1960 - RNA, 20 nt, synthetic construct
  misc_feature 1..20: note = Synthetic
  source 1..20: mol_type = other RNA
cgccgcgaccctgcgtgcgc

SEQ ID NO: 1961 - RNA, 20 nt, synthetic construct
  misc_feature 1..20: note = Synthetic
  source 1..20: mol_type = other RNA
cgcctgcacaaatggggacg

SEQ ID NO: 1962 - RNA, 20 nt, synthetic construct
  misc_feature 1..20: note = Synthetic
  source 1..20: mol_type = other RNA
cgcctgggaactgcggccgc

SEQ ID NO: 1963 - RNA, 20 nt, synthetic construct
  misc_feature 1..20: note = Synthetic
  source 1..20: mol_type = other RNA
cgtccccatttgtgcaggcg

SEQ ID NO: 1964 - RNA, 20 nt, synthetic construct
  misc_feature 1..20: note = Synthetic
  source 1..20: mol_type = other RNA
cttgccctgccatgtctcgc

SEQ ID NO: 1965 - RNA, 20 nt, synthetic construct
  misc_feature 1..20: note = Synthetic
  source 1..20: mol_type = other RNA
tcaagtttggcgcgaaattg

SEQ ID NO: 1966 - RNA, 20 nt, synthetic construct
  misc_feature 1..20: note = Synthetic
  source 1..20: mol_type = other RNA
tctcgccggaagcctgcgtc

SEQ ID NO: 1967 - RNA, 20 nt, synthetic construct
  misc_feature 1..20: note = Synthetic
  source 1..20: mol_type = other RNA
tggcgaggagcgcgagcccg

SEQ ID NO: 1968 - RNA, 22 nt, synthetic construct
  misc_feature 1..22: note = Synthetic
  source 1..22: mol_type = other RNA
cgcccccccgccccggcgcacg

SEQ ID NO: 1969 - RNA, 22 nt, synthetic construct
  misc_feature 1..22: note = Synthetic
  source 1..22: mol_type = other RNA
ttccggcgagacatggcagggc

SEQ ID NO: 1970 - RNA, 20 nt, synthetic construct
  misc_feature 1..20: note = Synthetic
  source 1..20: mol_type = other RNA
gacgtggggaagggcggggc

SEQ ID NO: 1971 - RNA, 20 nt, synthetic construct
  misc_feature 1..20: note = Synthetic
  source 1..20: mol_type = other RNA
gcgcctgttgattggccact

SEQ ID NO: 1972 - RNA, 20 nt, synthetic construct
  misc_feature 1..20: note = Synthetic
  source 1..20: mol_type = other RNA
gcgcgcggcgacgtggggaa

SEQ ID NO: 1973 - RNA, 20 nt, synthetic construct
  misc_feature 1..20: note = Synthetic
  source 1..20: mol_type = other RNA
gcgctccgccggaggaaccc

SEQ ID NO: 1974 - RNA, 20 nt, synthetic construct
  misc_feature 1..20: note = Synthetic
  source 1..20: mol_type = other RNA
gcggcgacgtggggaagggc

SEQ ID NO: 1975 - RNA, 20 nt, synthetic construct
  misc_feature 1..20: note = Synthetic
  source 1..20: mol_type = other RNA
gctcctgctggcgggaaatc

SEQ ID NO: 1976 - RNA, 20 nt, synthetic construct
  misc_feature 1..20: note = Synthetic
  source 1..20: mol_type = other RNA
gctggcacactggtgggtag

SEQ ID NO: 1977 - RNA, 20 nt, synthetic construct
  misc_feature 1..20: note = Synthetic
  source 1..20: mol_type = other RNA
ggcacactggtgggtagggg

SEQ ID NO: 1978 - RNA, 20 nt, synthetic construct
  misc_feature 1..20: note = Synthetic
  source 1..20: mol_type = other RNA
ggccccagtggccaatcaac

SEQ ID NO: 1979 - RNA, 20 nt, synthetic construct
  misc_feature 1..20: note = Synthetic
  source 1..20: mol_type = other RNA
ggcgcctcgccgtgcgcggg

SEQ ID NO: 1980 - RNA, 20 nt, synthetic construct
  misc_feature 1..20: note = Synthetic
  source 1..20: mol_type = other RNA
ggcgcctgttgattggccac

SEQ ID NO: 1981 - RNA, 20 nt, synthetic construct
  misc_feature 1..20: note = Synthetic
  source 1..20: mol_type = other RNA
ggcggggctggcacactggt

SEQ ID NO: 1982 - RNA, 20 nt, synthetic construct
  misc_feature 1..20: note = Synthetic
  source 1..20: mol_type = other RNA
ggctggcacactggtgggta

SEQ ID NO: 1983 - RNA, 20 nt, synthetic construct
  misc_feature 1..20: note = Synthetic
  source 1..20: mol_type = other RNA
ggctggcacgctggcggtga

SEQ ID NO: 1984 - RNA, 20 nt, synthetic construct
  misc_feature 1..20: note = Synthetic
  source 1..20: mol_type = other RNA
gggctggcacactggtgggt

SEQ ID NO: 1985 - RNA, 20 nt, synthetic construct
  misc_feature 1..20: note = Synthetic
  source 1..20: mol_type = other RNA
gggctggcacgctggcggtg

SEQ ID NO: 1986 - RNA, 20 nt, synthetic construct
  misc_feature 1..20: note = Synthetic
  source 1..20: mol_type = other RNA
ggggaggcgcgctccgccgg

SEQ ID NO: 1987 - RNA, 20 nt, synthetic construct
  misc_feature 1..20: note = Synthetic
  source 1..20: mol_type = other RNA
gtcgccgcgcgcccgggggc

SEQ ID NO: 1988 - RNA, 20 nt, synthetic construct
  misc_feature 1..20: note = Synthetic
  source 1..20: mol_type = other RNA
gtgcgcgggcggtgcgcgcc

SEQ ID NO: 1989 - RNA, 20 nt, synthetic construct
  misc_feature 1..20: note = Synthetic
  source 1..20: mol_type = other RNA
gttgattggccactggggcc

SEQ ID NO: 1990 - RNA, 20 nt, synthetic construct
  misc_feature 1..20: note = Synthetic
  source 1..20: mol_type = other RNA
aaagcaccgcatctaccgcg

SEQ ID NO: 1991 - RNA, 20 nt, synthetic construct
  misc_feature 1..20: note = Synthetic
  source 1..20: mol_type = other RNA
aacaggcgcctcgccgtgcg

SEQ ID NO: 1992 - RNA, 20 nt, synthetic construct
  misc_feature 1..20: note = Synthetic
  source 1..20: mol_type = other RNA
acaggcgcctcgccgtgcgc

SEQ ID NO: 1993 - RNA, 20 nt, synthetic construct
  misc_feature 1..20: note = Synthetic
  source 1..20: mol_type = other RNA
accgcgcggctcctgctggc

SEQ ID NO: 1994 - RNA, 20 nt, synthetic construct
  misc_feature 1..20: note = Synthetic
  source 1..20: mol_type = other RNA
acggcgaggcgcctgttgat

SEQ ID NO: 1995 - RNA, 20 nt, synthetic construct
  misc_feature 1..20: note = Synthetic
  source 1..20: mol_type = other RNA
atctaccgcgcggctcctgc

SEQ ID NO: 1996 - RNA, 20 nt, synthetic construct
  misc_feature 1..20: note = Synthetic
  source 1..20: mol_type = other RNA
caggagccgcgcggtagatg

SEQ ID NO: 1997 - RNA, 20 nt, synthetic construct
  misc_feature 1..20: note = Synthetic
  source 1..20: mol_type = other RNA
cccccagatttcccgccagc

SEQ ID NO: 1998 - RNA, 20 nt, synthetic construct
  misc_feature 1..20: note = Synthetic
  source 1..20: mol_type = other RNA
cccccgggcgcgcggcgacg

SEQ ID NO: 1999 - RNA, 20 nt, synthetic construct
  misc_feature 1..20: note = Synthetic
  source 1..20: mol_type = other RNA
ccccgggcgcgcggcgacgt

SEQ ID NO: 2000 - RNA, 20 nt, synthetic construct
  misc_feature 1..20: note = Synthetic
  source 1..20: mol_type = other RNA
cgcaccgcccgcgcacggcg

SEQ ID NO: 2001 - RNA, 20 nt, synthetic construct
  misc_feature 1..20: note = Synthetic
  source 1..20: mol_type = other RNA
cgcctgttgattggccactg

SEQ ID NO: 2002 - RNA, 20 nt, synthetic construct
  misc_feature 1..20: note = Synthetic
  source 1..20: mol_type = other RNA
cgcgctccgccggaggaacc

SEQ ID NO: 2003 - RNA, 20 nt, synthetic construct
  misc_feature 1..20: note = Synthetic
  source 1..20: mol_type = other RNA
cgcggcgacgtggggaaggg

SEQ ID NO: 2004 - RNA, 20 nt, synthetic construct
  misc_feature 1..20: note = Synthetic
  source 1..20: mol_type = other RNA
cggaggaacccgggccccag

SEQ ID NO: 2005 - RNA, 20 nt, synthetic construct
  misc_feature 1..20: note = Synthetic
  source 1..20: mol_type = other RNA
cgtcgccgcgcgcccggggg

SEQ ID NO: 2006 - RNA, 20 nt, synthetic construct
  misc_feature 1..20: note = Synthetic
  source 1..20: mol_type = other RNA
ctggcgggaaatctgggggg

SEQ ID NO: 2007 - RNA, 20 nt, synthetic construct
  misc_feature 1..20: note = Synthetic
  source 1..20: mol_type = other RNA
taccgcgcggctcctgctgg

SEQ ID NO: 2008 - RNA, 20 nt, synthetic construct
  misc_feature 1..20: note = Synthetic
  source 1..20: mol_type = other RNA
tggcgcgcaccgcccgcgca

SEQ ID NO: 2009 - RNA, 20 nt, synthetic construct
  misc_feature 1..20: note = Synthetic
  source 1..20: mol_type = other RNA
tggggcccgggttcctccgg

SEQ ID NO: 2010 - RNA, 22 nt, synthetic construct
  misc_feature 1..22: note = Synthetic
  source 1..22: mol_type = other RNA
gaagggcggggctggcacactg

SEQ ID NO: 2011 - RNA, 22 nt, synthetic construct
  misc_feature 1..22: note = Synthetic
  source 1..22: mol_type = other RNA
cctgttgattggccactggggc

SEQ ID NO: 2012 - RNA, 20 nt, synthetic construct
  misc_feature 1..20: note = Synthetic
  source 1..20: mol_type = other RNA
gacagtggtgaaccgcatcg

SEQ ID NO: 2013 - RNA, 20 nt, synthetic construct
  misc_feature 1..20: note = Synthetic
  source 1..20: mol_type = other RNA
gactggcacgtcagggaacc

SEQ ID NO: 2014 - RNA, 20 nt, synthetic construct
  misc_feature 1..20: note = Synthetic
  source 1..20: mol_type = other RNA
gcacgaggcactgaggtgat

SEQ ID NO: 2015 - RNA, 20 nt, synthetic construct
  misc_feature 1..20: note = Synthetic
  source 1..20: mol_type = other RNA
gccaaaatgtcgttcgtggc

SEQ ID NO: 2016 - RNA, 20 nt, synthetic construct
  misc_feature 1..20: note = Synthetic
  source 1..20: mol_type = other RNA
gcgcaagcgcatatccttct

SEQ ID NO: 2017 - RNA, 20 nt, synthetic construct
  misc_feature 1..20: note = Synthetic
  source 1..20: mol_type = other RNA
gcgcatgcccacaacggcgg

SEQ ID NO: 2018 - RNA, 20 nt, synthetic construct
  misc_feature 1..20: note = Synthetic
  source 1..20: mol_type = other RNA
gcgctgtacatgcctctgcc

SEQ ID NO: 2019 - RNA, 20 nt, synthetic construct
  misc_feature 1..20: note = Synthetic
  source 1..20: mol_type = other RNA
gcggacacgcctctttgccc

SEQ ID NO: 2020 - RNA, 20 nt, synthetic construct
  misc_feature 1..20: note = Synthetic
  source 1..20: mol_type = other RNA
gctactgcccgctacctaga

SEQ ID NO: 2021 - RNA, 20 nt, synthetic construct
  misc_feature 1..20: note = Synthetic
  source 1..20: mol_type = other RNA
gctcctaaaaacgaaccaat

SEQ ID NO: 2022 - RNA, 20 nt, synthetic construct
  misc_feature 1..20: note = Synthetic
  source 1..20: mol_type = other RNA
ggaaacgtctagatgctcaa

SEQ ID NO: 2023 - RNA, 20 nt, synthetic construct
  misc_feature 1..20: note = Synthetic
  source 1..20: mol_type = other RNA
ggcaggggttattcggcggc

SEQ ID NO: 2024 - RNA, 20 nt, synthetic construct
  misc_feature 1..20: note = Synthetic
  source 1..20: mol_type = other RNA
ggccgcgtcactcaatggcg

SEQ ID NO: 2025 - RNA, 20 nt, synthetic construct
  misc_feature 1..20: note = Synthetic
  source 1..20: mol_type = other RNA
ggtacggagggagtcgagcc

SEQ ID NO: 2026 - RNA, 20 nt, synthetic construct
  misc_feature 1..20: note = Synthetic
  source 1..20: mol_type = other RNA
ggtgaaccgcatcgcggcgg

SEQ ID NO: 2027 - RNA, 20 nt, synthetic construct
  misc_feature 1..20: note = Synthetic
  source 1..20: mol_type = other RNA
ggttccctgacgtgccagtc

SEQ ID NO: 2028 - RNA, 20 nt, synthetic construct
  misc_feature 1..20: note = Synthetic
  source 1..20: mol_type = other RNA
ggttcgtttttaggagctcg

SEQ ID NO: 2029 - RNA, 20 nt, synthetic construct
  misc_feature 1..20: note = Synthetic
  source 1..20: mol_type = other RNA
gtccgcgccattgagtgacg

SEQ ID NO: 2030 - RNA, 20 nt, synthetic construct
  misc_feature 1..20: note = Synthetic
  source 1..20: mol_type = other RNA
gtcgagccgggctcacttaa

SEQ ID NO: 2031 - RNA, 20 nt, synthetic construct
  misc_feature 1..20: note = Synthetic
  source 1..20: mol_type = other RNA
gtggtgaaccgcatcgcggc

SEQ ID NO: 2032 - RNA, 20 nt, synthetic construct
  misc_feature 1..20: note = Synthetic
  source 1..20: mol_type = other RNA
acagcgcatgcccacaacgg

SEQ ID NO: 2033 - RNA, 20 nt, synthetic construct
  misc_feature 1..20: note = Synthetic
  source 1..20: mol_type = other RNA
acttaagggctacgacttaa

SEQ ID NO: 2034 - RNA, 20 nt, synthetic construct
  misc_feature 1..20: note = Synthetic
  source 1..20: mol_type = other RNA
agtcgagccgggctcactta

SEQ ID NO: 2035 - RNA, 20 nt, synthetic construct
  misc_feature 1..20: note = Synthetic
  source 1..20: mol_type = other RNA
agtggtgaaccgcatcgcgg

SEQ ID NO: 2036 - RNA, 20 nt, synthetic construct
  misc_feature 1..20: note = Synthetic
  source 1..20: mol_type = other RNA
atggcgtaagctacagctga

SEQ ID NO: 2037 - RNA, 20 nt, synthetic construct
  misc_feature 1..20: note = Synthetic
  source 1..20: mol_type = other RNA
ccacaacggcggaggccgcc

SEQ ID NO: 2038 - RNA, 20 nt, synthetic construct
  misc_feature 1..20: note = Synthetic
  source 1..20: mol_type = other RNA
cccacaacggcggaggccgc

SEQ ID NO: 2039 - RNA, 20 nt, synthetic construct
  misc_feature 1..20: note = Synthetic
  source 1..20: mol_type = other RNA
ccggcggcctccgccgttgt

SEQ ID NO: 2040 - RNA, 20 nt, synthetic construct
  misc_feature 1..20: note = Synthetic
  source 1..20: mol_type = other RNA
cgcatatccttctaggtagc

SEQ ID NO: 2041 - RNA, 20 nt, synthetic construct
  misc_feature 1..20: note = Synthetic
  source 1..20: mol_type = other RNA
cgcggacacgcctctttgcc

SEQ ID NO: 2042 - RNA, 20 nt, synthetic construct
  misc_feature 1..20: note = Synthetic
  source 1..20: mol_type = other RNA
cggcgggggaagttatccag

SEQ ID NO: 2043 - RNA, 20 nt, synthetic construct
  misc_feature 1..20: note = Synthetic
  source 1..20: mol_type = other RNA
cgttcgtggcaggggttatt

SEQ ID NO: 2044 - RNA, 20 nt, synthetic construct
  misc_feature 1..20: note = Synthetic
  source 1..20: mol_type = other RNA
cttaagggctacgacttaac

SEQ ID NO: 2045 - RNA, 20 nt, synthetic construct
  misc_feature 1..20: note = Synthetic
  source 1..20: mol_type = other RNA
taacgggccgcgtcactcaa

SEQ ID NO: 2046 - RNA, 20 nt, synthetic construct
  misc_feature 1..20: note = Synthetic
  source 1..20: mol_type = other RNA
taacttcccccgccgcgatg

SEQ ID NO: 2047 - RNA, 20 nt, synthetic construct
  misc_feature 1..20: note = Synthetic
  source 1..20: mol_type = other RNA
tagcgggcagtagccgcttc

SEQ ID NO: 2048 - RNA, 20 nt, synthetic construct
  misc_feature 1..20: note = Synthetic
  source 1..20: mol_type = other RNA
tcgtggcaggggttattcgg

SEQ ID NO: 2049 - RNA, 20 nt, synthetic construct
  misc_feature 1..20: note = Synthetic
  source 1..20: mol_type = other RNA
tgatagcattagctggccgc

SEQ ID NO: 2050 - RNA, 20 nt, synthetic construct
  misc_feature 1..20: note = Synthetic
  source 1..20: mol_type = other RNA
tggcgccaaaatgtcgttcg

SEQ ID NO: 2051 - RNA, 20 nt, synthetic construct
  misc_feature 1..20: note = Synthetic
  source 1..20: mol_type = other RNA
tggtgaaccgcatcgcggcg

SEQ ID NO: 2052 - RNA, 22 nt, synthetic construct
  misc_feature 1..22: note = Synthetic
  source 1..22: mol_type = other RNA
gacgaagagacccagcaaccca

SEQ ID NO: 2053 - RNA, 22 nt, synthetic construct
  misc_feature 1..22: note = Synthetic
  source 1..22: mol_type = other RNA
gatgattgagaactggtacgga

SEQ ID NO: 2054 - RNA, 22 nt, synthetic construct
  misc_feature 1..22: note = Synthetic
  source 1..22: mol_type = other RNA
gcaaagaggcgtgtccgcgcca

SEQ ID NO: 2055 - RNA, 22 nt, synthetic construct
  misc_feature 1..22: note = Synthetic
  source 1..22: mol_type = other RNA
gccagtcaaatttctcaactct

SEQ ID NO: 2056 - RNA, 22 nt, synthetic construct
  misc_feature 1..22: note = Synthetic
  source 1..22: mol_type = other RNA
gcgccaaaatgtcgttcgtggc

SEQ ID NO: 2057 - RNA, 22 nt, synthetic construct
  misc_feature 1..22: note = Synthetic
  source 1..22: mol_type = other RNA
gcggctactgcccgctacctag

SEQ ID NO: 2058 - RNA, 22 nt, synthetic construct
  misc_feature 1..22: note = Synthetic
  source 1..22: mol_type = other RNA
gggttgtttggagtgtaagtgg

SEQ ID NO: 2059 - RNA, 22 nt, synthetic construct
  misc_feature 1..22: note = Synthetic
  source 1..22: mol_type = other RNA
gtccaatcaatagctgccgctg

SEQ ID NO: 2060 - RNA, 22 nt, synthetic construct
  misc_feature 1..22: note = Synthetic
  source 1..22: mol_type = other RNA
aatttctcaactctgtgggttg

SEQ ID NO: 2061 - RNA, 22 nt, synthetic construct
  misc_feature 1..22: note = Synthetic
  source 1..22: mol_type = other RNA
atgcccacaacggcggaggccg

SEQ ID NO: 2062 - RNA, 22 nt, synthetic construct
  misc_feature 1..22: note = Synthetic
  source 1..22: mol_type = other RNA
ccgagaccttttaagggttgtt

SEQ ID NO: 2063 - RNA, 22 nt, synthetic construct
  misc_feature 1..22: note = Synthetic
  source 1..22: mol_type = other RNA
ccgctctcccccgagacctttt

SEQ ID NO: 2064 - RNA, 22 nt, synthetic construct
  misc_feature 1..22: note = Synthetic
  source 1..22: mol_type = other RNA
cggcagctattgattggacagc

SEQ ID NO: 2065 - RNA, 22 nt, synthetic construct
  misc_feature 1..22: note = Synthetic
  source 1..22: mol_type = other RNA
ctttgatagcattagctggccg

SEQ ID NO: 2066 - RNA, 22 nt, synthetic construct
  misc_feature 1..22: note = Synthetic
  source 1..22: mol_type = other RNA
tagctgccgctgaagggtgggg

SEQ ID NO: 2067 - RNA, 22 nt, synthetic construct
  misc_feature 1..22: note = Synthetic
  source 1..22: mol_type = other RNA
tcaccactgtctcgtccagccg

SEQ ID NO: 2068 - RNA, 22 nt, synthetic construct
  misc_feature 1..22: note = Synthetic
  source 1..22: mol_type = other RNA
ttggttcgtttttaggagctcg

SEQ ID NO: 2069 - RNA, 20 nt, synthetic construct
  misc_feature 1..20: note = Synthetic
  source 1..20: mol_type = other RNA
gacagagccaataggcgaaa

SEQ ID NO: 2070 - RNA, 20 nt, synthetic construct
  misc_feature 1..20: note = Synthetic
  source 1..20: mol_type = other RNA
gactgggaaagttccctcca

SEQ ID NO: 2071 - RNA, 20 nt, synthetic construct
  misc_feature 1..20: note = Synthetic
  source 1..20: mol_type = other RNA
gcaacacccgatccgcctcg

SEQ ID NO: 2072 - RNA, 20 nt, synthetic construct
  misc_feature 1..20: note = Synthetic
  source 1..20: mol_type = other RNA
gcagccaatgggagttcagg

SEQ ID NO: 2073 - RNA, 20 nt, synthetic construct
  misc_feature 1..20: note = Synthetic
  source 1..20: mol_type = other RNA
gccaatgggagttcaggagg

SEQ ID NO: 2074 - RNA, 20 nt, synthetic construct
  misc_feature 1..20: note = Synthetic
  source 1..20: mol_type = other RNA
gccgccccgcccggaaaggg

SEQ ID NO: 2075 - RNA, 20 nt, synthetic construct
  misc_feature 1..20: note = Synthetic
  source 1..20: mol_type = other RNA
gcgcctgtgggagccctgga

SEQ ID NO: 2076 - RNA, 20 nt, synthetic construct
  misc_feature 1..20: note = Synthetic
  source 1..20: mol_type = other RNA
ggactgggaaagttccctcc

SEQ ID NO: 2077 - RNA, 20 nt, synthetic construct
  misc_feature 1..20: note = Synthetic
  source 1..20: mol_type = other RNA
gggaactttcccagtccccg

SEQ ID NO: 2078 - RNA, 20 nt, synthetic construct
  misc_feature 1..20: note = Synthetic
  source 1..20: mol_type = other RNA
gtgctccaccctttccgggc

SEQ ID NO: 2079 - RNA, 20 nt, synthetic construct
  misc_feature 1..20: note = Synthetic
  source 1..20: mol_type = other RNA
gttccctccagggctcccac

SEQ ID NO: 2080 - RNA, 20 nt, synthetic construct
  misc_feature 1..20: note = Synthetic
  source 1..20: mol_type = other RNA
aaagcagccaatgggagttc

SEQ ID NO: 2081 - RNA, 20 nt, synthetic construct
  misc_feature 1..20: note = Synthetic
  source 1..20: mol_type = other RNA
acccgatccgcctcggggac

SEQ ID NO: 2082 - RNA, 20 nt, synthetic construct
  misc_feature 1..20: note = Synthetic
  source 1..20: mol_type = other RNA
agcgcctgtgggagccctgg

SEQ ID NO: 2083 - RNA, 20 nt, synthetic construct
  misc_feature 1..20: note = Synthetic
  source 1..20: mol_type = other RNA
agtatttttgccgccccgcc

SEQ ID NO: 2084 - RNA, 20 nt, synthetic construct
  misc_feature 1..20: note = Synthetic
  source 1..20: mol_type = other RNA
atgcaacacccgatccgcct

SEQ ID NO: 2085 - RNA, 20 nt, synthetic construct
  misc_feature 1..20: note = Synthetic
  source 1..20: mol_type = other RNA
cccgatccgcctcggggact

SEQ ID NO: 2086 - RNA, 20 nt, synthetic construct
  misc_feature 1..20: note = Synthetic
  source 1..20: mol_type = other RNA
cgacctttgacagagccaat

SEQ ID NO: 2087 - RNA, 20 nt, synthetic construct
  misc_feature 1..20: note = Synthetic
  source 1..20: mol_type = other RNA
cggagcgcctgtgggagccc

SEQ ID NO: 2088 - RNA, 20 nt, synthetic construct
  misc_feature 1..20: note = Synthetic
  source 1..20: mol_type = other RNA
cggatcgggtgttgcatcca

SEQ ID NO: 2089 - RNA, 20 nt, synthetic construct
  misc_feature 1..20: note = Synthetic
  source 1..20: mol_type = other RNA
cggtgtgctctgattggccc

SEQ ID NO: 2090 - RNA, 20 nt, synthetic construct
  misc_feature 1..20: note = Synthetic
  source 1..20: mol_type = other RNA
cttcgtgacgtcaaagagcc

SEQ ID NO: 2091 - RNA, 20 nt, synthetic construct
  misc_feature 1..20: note = Synthetic
  source 1..20: mol_type = other RNA
tcaggaggcggagcgcctgt

SEQ ID NO: 2092 - RNA, 20 nt, synthetic construct
  misc_feature 1..20: note = Synthetic
  source 1..20: mol_type = other RNA
tcccagtccccgaggcggat

SEQ ID NO: 2093 - RNA, 20 nt, synthetic construct
  misc_feature 1..20: note = Synthetic
  source 1..20: mol_type = other RNA
tccgcctcctgaactcccat

SEQ ID NO: 2094 - RNA, 20 nt, synthetic construct
  misc_feature 1..20: note = Synthetic
  source 1..20: mol_type = other RNA
tcgcctattggctctgtcaa

SEQ ID NO: 2095 - RNA, 20 nt, synthetic construct
  misc_feature 1..20: note = Synthetic
  source 1..20: mol_type = other RNA
tgcaacacccgatccgcctc

SEQ ID NO: 2096 - RNA, 20 nt, synthetic construct
  misc_feature 1..20: note = Synthetic
  source 1..20: mol_type = other RNA
ttcaggaggcggagcgcctg

SEQ ID NO: 2097 - RNA, 20 nt, synthetic construct
  misc_feature 1..20: note = Synthetic
  source 1..20: mol_type = other RNA
ttcgtgacgtcaaagagcct

SEQ ID NO: 2098 - RNA, 20 nt, synthetic construct
  misc_feature 1..20: note = Synthetic
  source 1..20: mol_type = other RNA
tttgccgccccgcccggaaa

SEQ ID NO: 2099 - RNA, 20 nt, synthetic construct
  misc_feature 1..20: note = Synthetic
  source 1..20: mol_type = other RNA
ttttgccgccccgcccggaa

SEQ ID NO: 2100 - RNA, 22 nt, synthetic construct
  misc_feature 1..22: note = Synthetic
  source 1..22: mol_type = other RNA
gggaactttcccagtccccgag

SEQ ID NO: 2101 - RNA, 22 nt, synthetic construct
  misc_feature 1..22: note = Synthetic
  source 1..22: mol_type = other RNA
cacaacgtcgaaagcagccaat

SEQ ID NO: 2102 - RNA, 22 nt, synthetic construct
  misc_feature 1..22: note = Synthetic
  source 1..22: mol_type = other RNA
ctttcccagtccccgaggcgga

SEQ ID NO: 2103 - RNA, 22 nt, synthetic construct
  misc_feature 1..22: note = Synthetic
  source 1..22: mol_type = other RNA
tatttttgccgccccgcccgga

SEQ ID NO: 2104 - RNA, 20 nt, synthetic construct
  misc_feature 1..20: note = Synthetic
  source 1..20: mol_type = other RNA
gaacaacgcgagtcggcgcg

SEQ ID NO: 2105 - RNA, 20 nt, synthetic construct
  misc_feature 1..20: note = Synthetic
  source 1..20: mol_type = other RNA
gacacccggtgggactcaga

SEQ ID NO: 2106 - RNA, 20 nt, synthetic construct
  misc_feature 1..20: note = Synthetic
  source 1..20: mol_type = other RNA
gagtgcgaaccgggcggcgg

SEQ ID NO: 2107 - RNA, 20 nt, synthetic construct
  misc_feature 1..20: note = Synthetic
  source 1..20: mol_type = other RNA
gccactgctgtgccggtccc

SEQ ID NO: 2108 - RNA, 20 nt, synthetic construct
  misc_feature 1..20: note = Synthetic
  source 1..20: mol_type = other RNA
gccccgattggcgggacgcg

SEQ ID NO: 2109 - RNA, 20 nt, synthetic construct
  misc_feature 1..20: note = Synthetic
  source 1..20: mol_type = other RNA
gccgcgtttggcgctcggtc

SEQ ID NO: 2110 - RNA, 20 nt, synthetic construct
  misc_feature 1..20: note = Synthetic
  source 1..20: mol_type = other RNA
gcctcgcgtcccgccaatcg

SEQ ID NO: 2111 - RNA, 20 nt, synthetic construct
  misc_feature 1..20: note = Synthetic
  source 1..20: mol_type = other RNA
gcggcgcttgattgggctgg

SEQ ID NO: 2112 - RNA, 20 nt, synthetic construct
  misc_feature 1..20: note = Synthetic
  source 1..20: mol_type = other RNA
gcgggcgcccgtccaatcac

SEQ ID NO: 2113 - RNA, 20 nt, synthetic construct
  misc_feature 1..20: note = Synthetic
  source 1..20: mol_type = other RNA
ggaccggcacagcagtggcg

SEQ ID NO: 2114 - RNA, 20 nt, synthetic construct
  misc_feature 1..20: note = Synthetic
  source 1..20: mol_type = other RNA
ggcgattgggctgccgcgtt

SEQ ID NO: 2115 - RNA, 20 nt, synthetic construct
  misc_feature 1..20: note = Synthetic
  source 1..20: mol_type = other RNA
ggcggcgcttgattgggctg

SEQ ID NO: 2116 - RNA, 20 nt, synthetic construct
  misc_feature 1..20: note = Synthetic
  source 1..20: mol_type = other RNA
gggcggcgcttgattgggct

SEQ ID NO: 2117 - RNA, 20 nt, synthetic construct
  misc_feature 1..20: note = Synthetic
  source 1..20: mol_type = other RNA
gggctccgggagtgcgaacc

SEQ ID NO: 2118 - RNA, 20 nt, synthetic construct
  misc_feature 1..20: note = Synthetic
  source 1..20: mol_type = other RNA
gggctgccgcgtttggcgct

SEQ ID NO: 2119 - RNA, 20 nt, synthetic construct
  misc_feature 1..20: note = Synthetic
  source 1..20: mol_type = other RNA
ggggcggcgcttgattgggc

SEQ ID NO: 2120 - RNA, 20 nt, synthetic construct
  misc_feature 1..20: note = Synthetic
  source 1..20: mol_type = other RNA
ggggctccgggagtgcgaac

SEQ ID NO: 2121 - RNA, 20 nt, synthetic construct
  misc_feature 1..20: note = Synthetic
  source 1..20: mol_type = other RNA
ggggggccaaataaaagcga

SEQ ID NO: 2122 - RNA, 20 nt, synthetic construct
  misc_feature 1..20: note = Synthetic
  source 1..20: mol_type = other RNA
ggtcgcgtccgacacccggt

SEQ ID NO: 2123 - RNA, 20 nt, synthetic construct
  misc_feature 1..20: note = Synthetic
  source 1..20: mol_type = other RNA
gtccggtcgcgtccgacacc

SEQ ID NO: 2124 - RNA, 20 nt, synthetic construct
  misc_feature 1..20: note = Synthetic
  source 1..20: mol_type = other RNA
aacaacgcgagtcggcgcgc

SEQ ID NO: 2125 - RNA, 20 nt, synthetic construct
  misc_feature 1..20: note = Synthetic
  source 1..20: mol_type = other RNA
aatcggggcggcgcttgatt

SEQ ID NO: 2126 - RNA, 20 nt, synthetic construct
  misc_feature 1..20: note = Synthetic
  source 1..20: mol_type = other RNA
accggaccgagcgccaaacg

SEQ ID NO: 2127 - RNA, 20 nt, synthetic construct
  misc_feature 1..20: note = Synthetic
  source 1..20: mol_type = other RNA
acgaaggtaacgcgccgctg

SEQ ID NO: 2128 - RNA, 20 nt, synthetic construct
  misc_feature 1..20: note = Synthetic
  source 1..20: mol_type = other RNA
aggtaacgcgccgctgcggg

SEQ ID NO: 2129 - RNA, 20 nt, synthetic construct
  misc_feature 1..20: note = Synthetic
  source 1..20: mol_type = other RNA
caagcgccgccccgattggc

SEQ ID NO: 2130 - RNA, 20 nt, synthetic construct
  misc_feature 1..20: note = Synthetic
  source 1..20: mol_type = other RNA
caatcaagcgccgccccgat

SEQ ID NO: 2131 - RNA, 20 nt, synthetic construct
  misc_feature 1..20: note = Synthetic
  source 1..20: mol_type = other RNA
caatcgccatcgcttttatt

SEQ ID NO: 2132 - RNA, 20 nt, synthetic construct
  misc_feature 1..20: note = Synthetic
  source 1..20: mol_type = other RNA
caatcggggcggcgcttgat

SEQ ID NO: 2133 - RNA, 20 nt, synthetic construct
  misc_feature 1..20: note = Synthetic
  source 1..20: mol_type = other RNA
caccgggtgtcggacgcgac

SEQ ID NO: 2134 - RNA, 20 nt, synthetic construct
  misc_feature 1..20: note = Synthetic
  source 1..20: mol_type = other RNA
ccgattggcgggacgcgagg

SEQ ID NO: 2135 - RNA, 20 nt, synthetic construct
  misc_feature 1..20: note = Synthetic
  source 1..20: mol_type = other RNA
ccgcctcgcgtcccgccaat

SEQ ID NO: 2136 - RNA, 20 nt, synthetic construct
  misc_feature 1..20: note = Synthetic
  source 1..20: mol_type = other RNA
cgagtcggcgcgcgggacga

SEQ ID NO: 2137 - RNA, 20 nt, synthetic construct
  misc_feature 1..20: note = Synthetic
  source 1..20: mol_type = other RNA
cgattggcgggacgcgaggc

SEQ ID NO: 2138 - RNA, 20 nt, synthetic construct
  misc_feature 1..20: note = Synthetic
  source 1..20: mol_type = other RNA
cgccgcccggttcgcactcc

SEQ ID NO: 2139 - RNA, 20 nt, synthetic construct
  misc_feature 1..20: note = Synthetic
  source 1..20: mol_type = other RNA
cgcctcgcgtcccgccaatc

SEQ ID NO: 2140 - RNA, 20 nt, synthetic construct
  misc_feature 1..20: note = Synthetic
  source 1..20: mol_type = other RNA
cgcgcgggaacaacgcgagt

SEQ ID NO: 2141 - RNA, 20 nt, synthetic construct
  misc_feature 1..20: note = Synthetic
  source 1..20: mol_type = other RNA
cggtcgcgtccgacacccgg

SEQ ID NO: 2142 - RNA, 20 nt, synthetic construct
  misc_feature 1..20: note = Synthetic
  source 1..20: mol_type = other RNA
tcaagcgccgccccgattgg

SEQ ID NO: 2143 - RNA, 20 nt, synthetic construct
  misc_feature 1..20: note = Synthetic
  source 1..20: mol_type = other RNA
tcgcgtcccgccaatcgggg

SEQ ID NO: 2144 - RNA, 22 nt, synthetic construct
  misc_feature 1..22: note = Synthetic
  source 1..22: mol_type = other RNA
gccgccggggctccactgcctt

SEQ ID NO: 2145 - RNA, 22 nt, synthetic construct
  misc_feature 1..22: note = Synthetic
  source 1..22: mol_type = other RNA
gcggcccggccggcggggctcc

SEQ ID NO: 2146 - RNA, 22 nt, synthetic construct
  misc_feature 1..22: note = Synthetic
  source 1..22: mol_type = other RNA
gggggcgacgcgcgggaacaac

SEQ ID NO: 2147 - RNA, 22 nt, synthetic construct
  misc_feature 1..22: note = Synthetic
  source 1..22: mol_type = other RNA
ccccgccactgctgtgccggtc

SEQ ID NO: 2148 - RNA, 22 nt, synthetic construct
  misc_feature 1..22: note = Synthetic
  source 1..22: mol_type = other RNA
ctccactgccttctgagtccca

SEQ ID NO: 2149 - RNA, 20 nt, synthetic construct
  misc_feature 1..20: note = Synthetic
  source 1..20: mol_type = other RNA
gagctgagcctaagccctgg

SEQ ID NO: 2150 - RNA, 20 nt, synthetic construct
  misc_feature 1..20: note = Synthetic
  source 1..20: mol_type = other RNA
gagtttcggccttcgcctgc

SEQ ID NO: 2151 - RNA, 20 nt, synthetic construct
  misc_feature 1..20: note = Synthetic
  source 1..20: mol_type = other RNA
gatcctactgcttttccagc

SEQ ID NO: 2152 - RNA, 20 nt, synthetic construct
  misc_feature 1..20: note = Synthetic
  source 1..20: mol_type = other RNA
gatcggccagtggcgacagc

SEQ ID NO: 2153 - RNA, 20 nt, synthetic construct
  misc_feature 1..20: note = Synthetic
  source 1..20: mol_type = other RNA
gatgccgactttagaggagg

SEQ ID NO: 2154 - RNA, 20 nt, synthetic construct
  misc_feature 1..20: note = Synthetic
  source 1..20: mol_type = other RNA
gcagatgccgactttagagg

SEQ ID NO: 2155 - RNA, 20 nt, synthetic construct
  misc_feature 1..20: note = Synthetic
  source 1..20: mol_type = other RNA
gctgagcctaagccctggcg

SEQ ID NO: 2156 - RNA, 20 nt, synthetic construct
  misc_feature 1..20: note = Synthetic
  source 1..20: mol_type = other RNA
gcttgcagccacccttgaat

SEQ ID NO: 2157 - RNA, 20 nt, synthetic construct
  misc_feature 1..20: note = Synthetic
  source 1..20: mol_type = other RNA
ggctgtaggtgagaactata

SEQ ID NO: 2158 - RNA, 20 nt, synthetic construct
  misc_feature 1..20: note = Synthetic
  source 1..20: mol_type = other RNA
gggctgtaggtgagaactat

SEQ ID NO: 2159 - RNA, 20 nt, synthetic construct
  misc_feature 1..20: note = Synthetic
  source 1..20: mol_type = other RNA
gtacagagtcaaccaattca

SEQ ID NO: 2160 - RNA, 20 nt, synthetic construct
  misc_feature 1..20: note = Synthetic
  source 1..20: mol_type = other RNA
aaagcagtaggatcggccag

SEQ ID NO: 2161 - RNA, 20 nt, synthetic construct
  misc_feature 1..20: note = Synthetic
  source 1..20: mol_type = other RNA
aactccgcctcctctaaagt

SEQ ID NO: 2162 - RNA, 20 nt, synthetic construct
  misc_feature 1..20: note = Synthetic
  source 1..20: mol_type = other RNA
actgcttttccagcaggcga

SEQ ID NO: 2163 - RNA, 20 nt, synthetic construct
  misc_feature 1..20: note = Synthetic
  source 1..20: mol_type = other RNA
agagtcaaccaattcaaggg

SEQ ID NO: 2164 - RNA, 20 nt, synthetic construct
  misc_feature 1..20: note = Synthetic
  source 1..20: mol_type = other RNA
agctgagcctaagccctggc

SEQ ID NO: 2165 - RNA, 20 nt, synthetic construct
  misc_feature 1..20: note = Synthetic
  source 1..20: mol_type = other RNA
ccaaagccccgccagggctt

SEQ ID NO: 2166 - RNA, 20 nt, synthetic construct
  misc_feature 1..20: note = Synthetic
  source 1..20: mol_type = other RNA
cctaagccctggcggggctt

SEQ ID NO: 2167 - RNA, 20 nt, synthetic construct
  misc_feature 1..20: note = Synthetic
  source 1..20: mol_type = other RNA
cgtgctcattggctggtgta

SEQ ID NO: 2168 - RNA, 20 nt, synthetic construct
  misc_feature 1..20: note = Synthetic
  source 1..20: mol_type = other RNA
ctaagccctggcggggcttt

SEQ ID NO: 2169 - RNA, 20 nt, synthetic construct
  misc_feature 1..20: note = Synthetic
  source 1..20: mol_type = other RNA
ctacagcccaaagccccgcc

SEQ ID NO: 2170 - RNA, 20 nt, synthetic construct
  misc_feature 1..20: note = Synthetic
  source 1..20: mol_type = other RNA
ctggcggggctttgggctgt

SEQ ID NO: 2171 - RNA, 20 nt, synthetic construct
  misc_feature 1..20: note = Synthetic
  source 1..20: mol_type = other RNA
ctttagaggaggcggagttt

SEQ ID NO: 2172 - RNA, 20 nt, synthetic construct
  misc_feature 1..20: note = Synthetic
  source 1..20: mol_type = other RNA
tacagagtcaaccaattcaa

SEQ ID NO: 2173 - RNA, 20 nt, synthetic construct
  misc_feature 1..20: note = Synthetic
  source 1..20: mol_type = other RNA
tacagcccaaagccccgcca

SEQ ID NO: 2174 - RNA, 20 nt, synthetic construct
  misc_feature 1..20: note = Synthetic
  source 1..20: mol_type = other RNA
tcagctcctgctgtcgccac

SEQ ID NO: 2175 - RNA, 20 nt, synthetic construct
  misc_feature 1..20: note = Synthetic
  source 1..20: mol_type = other RNA
tcgcctgctggaaaagcagt

SEQ ID NO: 2176 - RNA, 20 nt, synthetic construct
  misc_feature 1..20: note = Synthetic
  source 1..20: mol_type = other RNA
tgcgcagatgccgactttag

SEQ ID NO: 2177 - RNA, 20 nt, synthetic construct
  misc_feature 1..20: note = Synthetic
  source 1..20: mol_type = other RNA
tgcggcgcgtgctcattggc

SEQ ID NO: 2178 - RNA, 20 nt, synthetic construct
  misc_feature 1..20: note = Synthetic
  source 1..20: mol_type = other RNA
tgctggaaaagcagtaggat

SEQ ID NO: 2179 - RNA, 20 nt, synthetic construct
  misc_feature 1..20: note = Synthetic
  source 1..20: mol_type = other RNA
tggctgcggcgcgtgctcat

SEQ ID NO: 2180 - RNA, 22 nt, synthetic construct
  misc_feature 1..22: note = Synthetic
  source 1..22: mol_type = other RNA
gccgtacagagtcaaccaattc

SEQ ID NO: 2181 - RNA, 22 nt, synthetic construct
  misc_feature 1..22: note = Synthetic
  source 1..22: mol_type = other RNA
ggtgtatggcttgcagccaccc

SEQ ID NO: 2182 - RNA, 22 nt, synthetic construct
  misc_feature 1..22: note = Synthetic
  source 1..22: mol_type = other RNA
agtcggcatctgcgcagccgta

SEQ ID NO: 2183 - RNA, 22 nt, synthetic construct
  misc_feature 1..22: note = Synthetic
  source 1..22: mol_type = other RNA
cagatgccgactttagaggagg

SEQ ID NO: 2184 - RNA, 22 nt, synthetic construct
  misc_feature 1..22: note = Synthetic
  source 1..22: mol_type = other RNA
ccttcgcctgctggaaaagcag

SEQ ID NO: 2185 - RNA, 22 nt, synthetic construct
  misc_feature 1..22: note = Synthetic
  source 1..22: mol_type = other RNA
tttgggctgtaggtgagaacta

SEQ ID NO: 2186 - RNA, 20 nt, synthetic construct
  misc_feature 1..20: note = Synthetic
  source 1..20: mol_type = other RNA
gaaggcctgcccagcgtagc

SEQ ID NO: 2187 - RNA, 20 nt, synthetic construct
  misc_feature 1..20: note = Synthetic
  source 1..20: mol_type = other RNA
gaataataagccgggtacag

SEQ ID NO: 2188 - RNA, 20 nt, synthetic construct
  misc_feature 1..20: note = Synthetic
  source 1..20: mol_type = other RNA
gaatccggggccctttagcg

SEQ ID NO: 2189 - RNA, 20 nt, synthetic construct
  misc_feature 1..20: note = Synthetic
  source 1..20: mol_type = other RNA
gacgacactctcccgactgg

SEQ ID NO: 2190 - RNA, 20 nt, synthetic construct
  misc_feature 1..20: note = Synthetic
  source 1..20: mol_type = other RNA
gagcgcgaaagaaagaggaa

SEQ ID NO: 2191 - RNA, 20 nt, synthetic construct
  misc_feature 1..20: note = Synthetic
  source 1..20: mol_type = other RNA
gcaagcgctctcctccagtc

SEQ ID NO: 2192 - RNA, 20 nt, synthetic construct
  misc_feature 1..20: note = Synthetic
  source 1..20: mol_type = other RNA
gccgccgcggaataataagc

SEQ ID NO: 2193 - RNA, 20 nt, synthetic construct
  misc_feature 1..20: note = Synthetic
  source 1..20: mol_type = other RNA
gcgaaagaaagaggaaaggg

SEQ ID NO: 2194 - RNA, 20 nt, synthetic construct
  misc_feature 1..20: note = Synthetic
  source 1..20: mol_type = other RNA
gcggctagagaaaaagcagg

SEQ ID NO: 2195 - RNA, 20 nt, synthetic construct
  misc_feature 1..20: note = Synthetic
  source 1..20: mol_type = other RNA
gctacccgattggtgaatcc

SEQ ID NO: 2196 - RNA, 20 nt, synthetic construct
  misc_feature 1..20: note = Synthetic
  source 1..20: mol_type = other RNA
gctggctcttggaaattgag

SEQ ID NO: 2197 - RNA, 20 nt, synthetic construct
  misc_feature 1..20: note = Synthetic
  source 1..20: mol_type = other RNA
gctgggcaggccttcccggg

SEQ ID NO: 2198 - RNA, 20 nt, synthetic construct
  misc_feature 1..20: note = Synthetic
  source 1..20: mol_type = other RNA
ggctacccgattggtgaatc

SEQ ID NO: 2199 - RNA, 20 nt, synthetic construct
  misc_feature 1..20: note = Synthetic
  source 1..20: mol_type = other RNA
ggctagagcgcgaaagaaag

SEQ ID NO: 2200 - RNA, 20 nt, synthetic construct
  misc_feature 1..20: note = Synthetic
  source 1..20: mol_type = other RNA
gggccccggattcaccaatc

SEQ ID NO: 2201 - RNA, 20 nt, synthetic construct
  misc_feature 1..20: note = Synthetic
  source 1..20: mol_type = other RNA
ggggtcagggtcgtgtctag

SEQ ID NO: 2202 - RNA, 20 nt, synthetic construct
  misc_feature 1..20: note = Synthetic
  source 1..20: mol_type = other RNA
gggtacagtggctggggtca

SEQ ID NO: 2203 - RNA, 20 nt, synthetic construct
  misc_feature 1..20: note = Synthetic
  source 1..20: mol_type = other RNA
ggttgttgtagctgccgctg

SEQ ID NO: 2204 - RNA, 20 nt, synthetic construct
  misc_feature 1..20: note = Synthetic
  source 1..20: mol_type = other RNA
gtacccggcttattattccg

SEQ ID NO: 2205 - RNA, 20 nt, synthetic construct
  misc_feature 1..20: note = Synthetic
  source 1..20: mol_type = other RNA
gtcctactgtttctagtcag

SEQ ID NO: 2206 - RNA, 20 nt, synthetic construct
  misc_feature 1..20: note = Synthetic
  source 1..20: mol_type = other RNA
aaattgagcggagagcgacg

SEQ ID NO: 2207 - RNA, 20 nt, synthetic construct
  misc_feature 1..20: note = Synthetic
  source 1..20: mol_type = other RNA
aagtctacgggctacccgat

SEQ ID NO: 2208 - RNA, 20 nt, synthetic construct
  misc_feature 1..20: note = Synthetic
  source 1..20: mol_type = other RNA
agtttgaaactgctcgcact

SEQ ID NO: 2209 - RNA, 20 nt, synthetic construct
  misc_feature 1..20: note = Synthetic
  source 1..20: mol_type = other RNA
caatcagagcccagctacgc

SEQ ID NO: 2210 - RNA, 20 nt, synthetic construct
  misc_feature 1..20: note = Synthetic
  source 1..20: mol_type = other RNA
cccggcttattattccgcgg

SEQ ID NO: 2211 - RNA, 20 nt, synthetic construct
  misc_feature 1..20: note = Synthetic
  source 1..20: mol_type = other RNA
ccgccgcggaataataagcc

SEQ ID NO: 2212 - RNA, 20 nt, synthetic construct
  misc_feature 1..20: note = Synthetic
  source 1..20: mol_type = other RNA
cgcaagcgctctcctccagt

SEQ ID NO: 2213 - RNA, 20 nt, synthetic construct
  misc_feature 1..20: note = Synthetic
  source 1..20: mol_type = other RNA
cgcgctctagccacccggga

SEQ ID NO: 2214 - RNA, 20 nt, synthetic construct
  misc_feature 1..20: note = Synthetic
  source 1..20: mol_type = other RNA
cgcttgcgctcgcactcagt

SEQ ID NO: 2215 - RNA, 20 nt, synthetic construct
  misc_feature 1..20: note = Synthetic
  source 1..20: mol_type = other RNA
ctacccgattggtgaatccg

SEQ ID NO: 2216 - RNA, 20 nt, synthetic construct
  misc_feature 1..20: note = Synthetic
  source 1..20: mol_type = other RNA
ctacgctgggcaggccttcc

SEQ ID NO: 2217 - RNA, 20 nt, synthetic construct
  misc_feature 1..20: note = Synthetic
  source 1..20: mol_type = other RNA
ctcaccgcgctaaagggccc

SEQ ID NO: 2218 - RNA, 20 nt, synthetic construct
  misc_feature 1..20: note = Synthetic
  source 1..20: mol_type = other RNA
ctccgctgactagaaacagt

SEQ ID NO: 2219 - RNA, 20 nt, synthetic construct
  misc_feature 1..20: note = Synthetic
  source 1..20: mol_type = other RNA
ctttcgcgctctagccaccc

SEQ ID NO: 2220 - RNA, 20 nt, synthetic construct
  misc_feature 1..20: note = Synthetic
  source 1..20: mol_type = other RNA
taggacgacactctcccgac

SEQ ID NO: 2221 - RNA, 20 nt, synthetic construct
  misc_feature 1..20: note = Synthetic
  source 1..20: mol_type = other RNA
tctttcgcgctctagccacc

SEQ ID NO: 2222 - RNA, 20 nt, synthetic construct
  misc_feature 1..20: note = Synthetic
  source 1..20: mol_type = other RNA
tggggtcagggtcgtgtcta

SEQ ID NO: 2223 - RNA, 20 nt, synthetic construct
  misc_feature 1..20: note = Synthetic
  source 1..20: mol_type = other RNA
ttattccgcggcggccgcag

SEQ ID NO: 2224 - RNA, 20 nt, synthetic construct
  misc_feature 1..20: note = Synthetic
  source 1..20: mol_type = other RNA
ttcaaactcaccgcgctaaa

SEQ ID NO: 2225 - RNA, 20 nt, synthetic construct
  misc_feature 1..20: note = Synthetic
  source 1..20: mol_type = other RNA
tttcaaactcaccgcgctaa

SEQ ID NO: 2226 - RNA, 22 nt, synthetic construct
  misc_feature 1..22: note = Synthetic
  source 1..22: mol_type = other RNA
gaatccggggccctttagcgcg

SEQ ID NO: 2227 - RNA, 22 nt, synthetic construct
  misc_feature 1..22: note = Synthetic
  source 1..22: mol_type = other RNA
gcaagcgctctcctccagtcgg

SEQ ID NO: 2228 - RNA, 22 nt, synthetic construct
  misc_feature 1..22: note = Synthetic
  source 1..22: mol_type = other RNA
gcggccgccgcggaataataag

SEQ ID NO: 2229 - RNA, 22 nt, synthetic construct
  misc_feature 1..22: note = Synthetic
  source 1..22: mol_type = other RNA
gtagctgccgctgcggccgccg

SEQ ID NO: 2230 - RNA, 22 nt, synthetic construct
  misc_feature 1..22: note = Synthetic
  source 1..22: mol_type = other RNA
aaactcaccgcgctaaagggcc

SEQ ID NO: 2231 - RNA, 22 nt, synthetic construct
  misc_feature 1..22: note = Synthetic
  source 1..22: mol_type = other RNA
aaagcaggagggcgggcgccaa

SEQ ID NO: 2232 - RNA, 22 nt, synthetic construct
  misc_feature 1..22: note = Synthetic
  source 1..22: mol_type = other RNA
aagtctacgggctacccgattg

SEQ ID NO: 2233 - RNA, 22 nt, synthetic construct
  misc_feature 1..22: note = Synthetic
  source 1..22: mol_type = other RNA
agccgggtacagtggctggggt

SEQ ID NO: 2234 - RNA, 22 nt, synthetic construct
  misc_feature 1..22: note = Synthetic
  source 1..22: mol_type = other RNA
ataataagccgggtacagtggc

SEQ ID NO: 2235 - RNA, 22 nt, synthetic construct
  misc_feature 1..22: note = Synthetic
  source 1..22: mol_type = other RNA
cagctacgctgggcaggccttc

SEQ ID NO: 2236 - RNA, 22 nt, synthetic construct
  misc_feature 1..22: note = Synthetic
  source 1..22: mol_type = other RNA
taaagggccccggattcaccaa

SEQ ID NO: 2237 - protein, 1086 aa, Homo sapiens
MAGNHRLGLEAGDTDDPPRITQNPVINGNVALSDGHNTAEEDMEDDTSWRSEATFQFTVERFSRLSESVLSPPCFVRNLPWKIMVMPRFYPDRPHQKSVGFFLQCNAESDSTSWSCHAQAVLKIINYRDDEKSFSRRISHLFFHKENDWGFSNFMAWSEVTDPEKGFIDDDKVTFEVFVQADAPHGVAWDSKKHTGYVGLKNQGATCYMNSLLQTLFFTNQLRKAVYMMPTEGDDSSKSVPLALQRVFYELQHSDKPVGTKKLTKSFGWETLDSFMQHDVQELCRVLLDNVENKMKGTCVEGTIPKLFRGKMVSYIQCKEVDYRSDRREDYYDIQLSIKGKKNIFESFVDYVAVEQLDGDNKYDAGEHGLQEAEKGVKFLTLPPVLHLQLMRFMYDPQTDQNIKINDRFEFPEQLPLDEFLQKTDPKDPANYILHAVLVHSGDNHGGHYVVYLNPKGDGKWCKFDDDVVSRCTKEEAIEHNYGGHDDDLSVRHCTNAYMLVYIRESKLSEVLQAVTDHDIPQQLVERLQEEKRIEAQKRKERQEAHLYMQVQIVAEDQFCGHQGNDMYDEEKVKYTVFKVLKNSSLAEFVQSLSQTMGFPQDQIRLWPMQARSNGTKRPAMLDNEADGNKTMIELSDNENPWTIFLETVDPELAASGATLPKFDKDHDVMLFLKMYDPKTRSLNYCGHIYTPISCKIRDLLPVMCDRAGFIQDTSLILYEEVKPNLTERIQDYDVSLDKALDELMDGDIIVFQKDDPENDNSELPTAKEYFRDLYHRVDVIFCDKTIPNDPGFVVTLSNRMNYFQVAKTVAQRLNTDPMLLQFFKSQGYRDGPGNPLRHNYEGTLRDLLQFFKPRQPKKLYYQQLKMKITDFENRRSFKCIWLNSQFREEEITLYPDKHGCVRDLLEECKKAVELGEKASGKLRLLEIVSYKIIGVHQEDELLECLSPATSRTFRIEEIPLDQVDIDKENEMLVTVAHFHKEVFGTFGIPFLLRIHQGEHFREVMKRIQSLLDIQEKEFEKFKFAIVMMGRHQYINEDEYEVNLKDFEPQPGNMSHPRPWLGLDHFNKAPKRSRYTYLEKAIKIHN

SEQ ID NO: 2238 - protein, 172 aa, Homo sapiens
MASNFKKANMASSSQRKRMSPKPELTEEQKQEIREAFDLFDADGTGTIDVKELKVAMRALGFEPKKEEIKKMISEIDKEGTGKMNFGDFLTVMTQKMSEKDTKEEILKAFKLFDDDETGKISFKNLKRVAKELGENLTDEELQEMIDEADRDGDGEVSEQEFLRIMKKTSLY

SEQ ID NO: 2239 - protein, 409 aa, Homo sapiens
MQVTLKTLQQQTFKIDIDPEETVKALKEKIESEKGKDAFPVAGQKLIYAGKILNDDTALKEYKIDEKNFVVVMVTKPKAVSTPAPATTQQSAPASTTAVTSSTTTTVAQAPTPVPALAPTSTPASITPASATASSEPAPASAAKQEKPAEKPAETPVATSPTATDSTSGDSSRSNLFEDATSALVTGQSYENMVTEIMSMGYEREQVIAALRASFNNPDRAVEYLLMGIPGDRESQAVVDPPQAASTGAPQSSAVAAAAATTTATTTTTSSGGHPLEFLRNQPQFQQMRQIIQQNPSLLPALLQQIGRENPQLLQQISQHQEHFIQMLNEPVQEAGGQGGGGGGGSGGIAEAGSGHMNYIQVTPQEKEAIERLKALGFPEGLVIQAYFACEKNENLAANFLLQQNFDED

SEQ ID NO: 2240 - protein, 337 aa, Homo sapiens
MVTKPKAVSTPAPATTQQSAPASTTAVTSSTTTTVAQAPTPVPALAPTSTPASITPASATASSEPAPASAAKQEKPAEKPAETPVATSPTATDSTSGDSSRSNLFEDATSALVTGQSYENMVTEIMSMGYEREQVIAALRASFNNPDRAVEYLLMGIPGDRESQAVVDPPQAASTGAPQSSAVAAAAATTTATTTTTSSGGHPLEFLRNQPQFQQMRQIIQQNPSLLPALLQQIGRENPQLLQQISQHQEHFIQMLNEPVQEAGGQGGGGGGGSGGIAEAGSGHMNYIQVTPQEKEAIERLKALGFPEGLVIQAYFACEKNENLAANFLLQQNFDED

SEQ ID NO: 2241 - protein, 427 aa, Homo sapiens
MAPKKRPETQKTSEIVLRPRNKRSRSPLELEPEAKKLCAKGSGPSRRCDSDCLWVGLAGPQILPPCRSIVRTLHQHKLGRASWPSVQQGLQQSFLHTLDSYRILQKAAPFDRRATSLAWHPTHPSTVAVGSKGGDIMLWNFGIKDKPTFIKGIGAGGSITGLKFNPLNTNQFYASSMEGTTRLQDFKGNILRVFASSDTINIWFCSLDVSASSRMVVTGDNVGNVILLNMDGKELWNLRMHKKKVTHVALNPCCDWFLATASVDQTVKIWDLRQVRGKASFLYSLPHRHPVNAACFSPDGARLLTTDQKSEIRVYSASQWDCPLGLIPHPHRHFQHLTPIKAAWHPRYNLIVVGRYPDPNFKSCTPYELRTIDVFDGNSGKMMCQLYDPESSGISSLNEFNPMGDTLASAMGYHILIWSQEEARTRK

SEQ ID NO: 2242 - protein, 238 aa, Homo sapiens
MAPKKRPETQKTSEIVLRPRNKRSRSPLELEPEAKKLCAKGSGPSRRCDSDCLWVGLAGPQILPPCRSIVRTLHQHKLGRASWPSVQQGLQQSFLHTLDSYRILQKAAPFDRRATSLAWHPTHPSTVAVGSKGGDIMLWNFGIKDKPTFIKGAAWHPRYNLIVVGRYPDPNFKSCTPYELRTIDVFDGNSGKMMCQLYDPESSGISSLNEFNPMGDTLASAMGYHILIWSQEEARTRK

SEQ ID NO: 2243 - protein, 156 aa, Homo sapiens
MAPKKRPETQKTSEIVLRPRNKRSRSPLELEPEAKKLCAKGSGPSRRCDSDCLWVGLAGPQILPPCRSIVRTLHQHKLGRASWPSVQQGLQQSFLHTLDSYRILQKAAPFDRRATSLAWHPTHPSTVAVGSKGGDIMLWNFGIKDKPTFIKGHLVL

SEQ ID NO: 2244 - protein, 363 aa, Homo sapiens
MAPKKRPETQKTSEIVLRPRNKRSRSPLELEPEAKKLCAKGSGPSRRCDSDCLWVGLAGPQILPPCRSIVRTLHQHKLGRASWPSVQQIGAGGSITGLKFNPLNTNQFYASSMEGTTRLQDFKGNILRVFASSDTINIWFCSLDVSASSRMVVTGDNVGNVILLNMDGKELWNLRMHKKKVTHVALNPCCDWFLATASVDQTVKIWDLRQVRGKASFLYSLPHRHPVNAACFSPDGARLLTTDQKSEIRVYSASQWDCPLGLIPHPHRHFQHLTPIKAAWHPRYNLIVVGRYPDPNFKSCTPYELRTIDVFDGNSGKMMCQLYDPESSGISSLNEFNPMGDTLASAMGYHILIWSQEEARTRK

SEQ ID NO: 2245 - protein, 244 aa, Homo sapiens
MAPKKRPETQKTSEIVLRPRNKRSRSPLELEPEAKKLCAKGSGPSRRCDSDCLWVGLAGPQILPPCRSIVRTLHQHKLGRASWPSVQQGLQQSFLHTLDSYRILQKAAPFDRRATSLAWHPTHPSTVAVGSKGGDIMLWNFGIKDKPTFIKGIGAGGSITGLKFNPLNTNQFYASSMEGTTRLQDFKGNILRVFASSDTINIWFCSLDVSASSRMVVTGDNVGNVILLNMDGKELVSVPMEPGS

SEQ ID NO: 2246 - RNA, 19 nt, synthetic construct
  misc_feature 1..19: note = Synthetic
  source 1..19: mol_type = other RNA
cagcgactgtttgagaacc

SEQ ID NO: 2247 - RNA, 19 nt, synthetic construct
  misc_feature 1..19: note = Synthetic
  source 1..19: mol_type = other RNA
ctaatgagcttccatacaa

SEQ ID NO: 2248 - RNA, 19 nt, synthetic construct
  misc_feature 1..19: note = Synthetic
  source 1..19: mol_type = other RNA
gcggatagcttgtgatgaa

SEQ ID NO: 2249 - RNA, 19 nt, synthetic construct
  misc_feature 1..19: note = Synthetic
  source 1..19: mol_type = other RNA
gcaaagaaagctagaattg

SEQ ID NO: 2250 - protein, 499 aa, synthetic construct
  REGION 1..499: note = Synthetic
MGEEEFDMPQPPHGHVLHRHMRTIREVRTLVTRVITDVYYVDGTEVERKVTEETEEPIVECQECETEVSPSQTGGSSGDLGDISSFSSKASSLHRTSSGTSLSAMHSSGSSGKGAGPLRGKTSGTEPADFALPSSRGGPGKLSPRKGVSQTGTPVCEEDGDAGLGIRQGGKAPVTPRGRGRRGRPPSRTTGTRETAVPGPLGIEDISPNLSPDDKSFSRVVPRVPDSTRRTDVGAGALRRSDSPEIPFQAAAGPSDGLDASSPGNSFVGLRVVAKWSSNGYFYSGKITRDVGAGKYKLLFDDGYECDVLGKDILLCDPIPLDTEVTALSEDEYFSAGVVKGHRKESGELYYSIEKEGQRKWYKRMAVILSLEQGNRLREQYGLGPYEAVTPLTKAADISLDNLVEGKRKRRSNVSSPATPTASSSSSTTPTRKITESPRASMGVLSGKRKLITSEEERSPAKRGRKSATVKPGAVGAGEFVSPCESGDNTGEPSALEEQ

SEQ ID NO: 2251 - DNA, 1500 bp, synthetic construct
  misc_feature 1..1500: note = Synthetic
  source 1..1500: mol_type = other DNA
atgggagaagaagagtttgatatgcctcagcctccacatggccatgtcttacatcgtcacatgagaacaatccgggaagtacgcacacttgtcactcgtgtcattacagatgtgtattatgtggatggaacagaagtagaaagaaaagtaactgaggagactgaagagccaattgtagagtgtcaggagtgtgaaactgaagtttccccttcacagactgggggctcctcaggtgacctgggggatatcagctccttctcctccaaggcatccagcttacaccgcacatcaagtgggacaagtctctcagctatgcacagcagtggaagctcagggaaaggagccggaccactcagagggaaaaccagcgggacagaacccgcagattttgccttacccagctcccgaggaggcccaggaaaactgagtcctagaaaaggggtcagtcagacagggacgccagtgtgtgaggaggatggtgatgcaggccttggcatcagacagggagggaaggctccagtcacgcctcgtgggcgtgggcgaaggggccgcccaccttctcggaccactggaaccagagaaacagctgtgcctggccccttgggcatagaggacatttcacctaacttgtcaccagatgataaatccttcagccgtgtcgtgccccgagtgccagactccaccagacgaacagatgtgggtgctggtgctttgcgtcgtagtgactctccagaaattcctttccaggctgctgctggcccttctgatggcttagatgcctcctctccaggaaatagctttgtagggctccgtgttgtagccaagtggtcatccaatggctacttttactctgggaaaatcacacgagatgtcggagctgggaagtataaattgctctttgatgatgggtacgaatgtgatgtgttgggcaaagacattctgttatgtgaccccatcccgctggacactgaagtgacggccctctcggaggatgagtatttcagtgcaggagtggtgaaaggacataggaaggagtctggggaactgtactacagcattgaaaaagaaggccaaagaaagtggtataagcgaatggctgtcatcctgtccttggagcaaggaaacagactgagagagcagtatgggcttggcccctatgaagcagtaacacctcttacaaaggcagcagatatcagcttagacaatttggtggaagggaagcggaaacggcgcagtaacgtcagctccccagccacccctactgcctccagtagcagcagcacaacccctacccgaaagatcacagaaagtcctcgtgcctccatgggagttctctcaggcaaaagaaaacttatcacttctgaagaggaacggtcccctgccaagcgaggtcgcaagtctgccacagtaaaacctggtgcagtaggggcaggagagtttgtgagcccctgtgagagtggagacaacaccggtgaaccctctgccctggaagagcagtaa

SEQ ID NO: 2252 - protein, 660 aa, synthetic construct
  REGION 1..660: note = Synthetic
MDPPTTPIRGNLLHFPSSQGEEEKEKLEGDHTIRQSQQPMKPISPVKDPVSPASQKMVIQGPSSPQGEAMVTDVLEDQKEGRSTNKENPSKALIERPSQNNIGIQTMECSLRVPETVSAATQTIKNVCEQGTSTVDQNFGKQDATVQTERGSGEKPVSAPGDDTESLHSQGEEEFDMPQPPHGHVLHRHMRTIREVRTLVTRVITDVYYVDGTEVERKVTEETEEPIVECQECETEVSPSQTGGSSGDLGDISSFSSKASSLHRTSSGTSLSAMHSSGSSGKGAGPLRGKTSGTEPADFALPSSRGGPGKLSPRKGVSQTGTPVCEEDGDAGLGIRQGGKAPVTPRGRGRRGRPPSRTTGTRETAVPGPLGIEDISPNLSPDDKSFSRVVPRVPDSTRRTDVGAGALRRSDSPEIPFQAAAGPSDGLDASSPGNSFVGLRVVAKWSSNGYFYSGKITRDVGAGKYKLLFDDGYECDVLGKDILLCDPIPLDTEVTALSEDEYFSAGVVKGHRKESGELYYSIEKEGQRKWYKRMAVILSLEQGNRLREQYGLGPYEAVTPLTKAADISLDNLVEGKRKRRSNVSSPATPTASSSSSTTPTRKITESPRASMGVLSGKRKLITSEEERSPAKRGRKSATVKPGAVGAGEFVSPCESGDNTG

SEQ ID NO: 2253 - DNA, 1983 bp, synthetic construct
  misc_feature 1..1983: note = Synthetic
  source 1..1983: mol_type = other DNA
atggatccccccaccacacccatcagggggaacttgctccactttccaagttctcaaggagaagaggagaaagaaaaattggagggtgaccatacaatcaggcagagtcaacagcctatgaagcccattagtcctgtcaaggaccctgtttctcctgcttcccagaagatggtcatacaagggccatccagtcctcaaggagaggcaatggtgacagatgtgctagaagaccagaaagaaggacggagtactaataaggaaaatcctagtaaggccttgattgaaaggcccagccaaaataacataggaatccaaaccatggagtgttccttgagggtcccagaaactgtttcagcagcaacccagactataaagaatgtgtgtgagcaggggaccagtacagtggaccagaactttggaaagcaagatgccacagttcagactgagagggggagtggtgagaaaccagtcagtgctcctggggatgatacagagtcgctccatagccagggagaagaagagtttgatatgcctcagcctccacatggccatgtcttacatcgtcacatgagaacaatccgggaagtacgcacacttgtcactcgtgtcattacagatgtgtattatgtggatggaacagaagtagaaagaaaagtaactgaggagactgaagagccaattgtagagtgtcaggagtgtgaaactgaagtttccccttcacagactgggggctcctcaggtgacctgggggatatcagctccttctcctccaaggcatccagcttacaccgcacatcaagtgggacaagtctctcagctatgcacagcagtggaagctcagggaaaggagccggaccactcagagggaaaaccagcgggacagaacccgcagattttgccttacccagctcccgaggaggcccaggaaaactgagtcctagaaaaggggtcagtcagacagggacgccagtgtgtgaggaggatggtgatgcaggccttggcatcagacagggagggaaggctccagtcacgcctcgtgggcgtgggcgaaggggccgcccaccttctcggaccactggaaccagagaaacagctgtgcctggccccttgggcatagaggacatttcacctaacttgtcaccagatgataaatccttcagccgtgtcgtgccccgagtgccagactccaccagacgaacagatgtgggtgctggtgctttgcgtcgtagtgactctccagaaattcctttccaggctgctgctggcccttctgatggcttagatgcctcctctccaggaaatagctttgtagggctccgtgttgtagccaagtggtcatccaatggctacttttactctgggaaaatcacacgagatgtcggagctgggaagtataaattgctctttgatgatgggtacgaatgtgatgtgttgggcaaagacattctgttatgtgaccccatcccgctggacactgaagtgacggccctctcggaggatgagtatttcagtgcaggagtggtgaaaggacataggaaggagtctggggaactgtactacagcattgaaaaagaaggccaaagaaagtggtataagcgaatggctgtcatcctgtccttggagcaaggaaacagactgagagagcagtatgggcttggcccctatgaagcagtaacacctcttacaaaggcagcagatatcagcttagacaatttggtggaagggaagcggaaacggcgcagtaacgtcagctccccagccacccctactgcctccagtagcagcagcacaacccctacccgaaagatcacagaaagtcctcgtgcctccatgggagttctctcaggcaaaagaaaacttatcacttctgaagaggaacggtcccctgccaagcgaggtcgcaagtctgccacagtaaaacctggtgcagtaggggcaggagagtttgtgagcccctgtgagagtggagacaacaccggttaa

SEQ ID NO: 2254 - RNA, 21 nt, synthetic construct
  misc_feature 1..21: note = Synthetic
  source 1..21: mol_type = other RNA
cgtacgcggaatacttcgatt

SEQ ID NO: 2255 - DNA, 21 bp, synthetic construct
  misc_feature 1..21: note = Synthetic
  source 1..21: mol_type = other DNA
ggagtgggaaacggcggcgtt

SEQ ID NO: 2256 - DNA, 21 bp, synthetic construct
  misc_feature 1..21: note = Synthetic
  source 1..21: mol_type = other DNA
gtgccagcccccagttcctct

SEQ ID NO: 2257 - DNA, 22 bp, synthetic construct
  misc_feature 1..22: note = Synthetic
  source 1..22: mol_type = other DNA
gtgtcaccgccgcttcccgaga

SEQ ID NO: 2258 - DNA, 21 bp, synthetic construct
  misc_feature 1..21: note = Synthetic
  source 1..21: mol_type = other DNA
aggatggctgtcacgtcctcc

SEQ ID NO: 2259 - DNA, 21 bp, synthetic construct
  misc_feature 1..21: note = Synthetic
  source 1..21: mol_type = other DNA
acactgagccgccgccagcag

SEQ ID NO: 2260 - DNA, 21 bp, synthetic construct
  misc_feature 1..21: note = Synthetic
  source 1..21: mol_type = other DNA
tgtggttccttcatgccggga

SEQ ID NO: 2261 - DNA, 21 bp, synthetic construct
  misc_feature 1..21: note = Synthetic
  source 1..21: mol_type = other DNA
gccgggaaagaatgaggtgaa

SEQ ID NO: 2262 - DNA, 21 bp, synthetic construct
  misc_feature 1..21: note = Synthetic
  source 1..21: mol_type = other DNA
acataagtagccgcatggctg

SEQ ID NO: 2263 - DNA, 21 bp, synthetic construct
  misc_feature 1..21: note = Synthetic
  source 1..21: mol_type = other DNA
ccctgaggcagaggctgggcc

SEQ ID NO: 2264 - DNA, 21 bp, synthetic construct
  misc_feature 1..21: note = Synthetic
  source 1..21: mol_type = other DNA
cagcctctgcctcagggcctt

SEQ ID NO: 2265 - DNA, 21 bp, synthetic construct
  misc_feature 1..21: note = Synthetic
  source 1..21: mol_type = other DNA
tgcagtgccagtacacagcag

SEQ ID NO: 2266 - DNA, 21 bp, synthetic construct
  misc_feature 1..21: note = Synthetic
  source 1..21: mol_type = other DNA
aatttggcaccatggggatac

SEQ ID NO: 2267 - DNA, 21 bp, synthetic construct
  misc_feature 1..21: note = Synthetic
  source 1..21: mol_type = other DNA
cctttatacttcctcacatgg

SEQ ID NO: 2268 - DNA, 21 bp, synthetic construct
  misc_feature 1..21: note = Synthetic
  source 1..21: mol_type = other DNA
cgaagcggtctatggagatag

SEQ ID NO: 2269 - DNA, 21 bp, synthetic construct
  misc_feature 1..21: note = Synthetic
  source 1..21: mol_type = other DNA
tcctgtcccactgccacaaag

SEQ ID NO: 2270 - DNA, 21 bp, synthetic construct
  misc_feature 1..21: note = Synthetic
  source 1..21: mol_type = other DNA
tagttgcaacagatattcatc

SEQ ID NO: 2271 - DNA, 21 bp, synthetic construct
  misc_feature 1..21: note = Synthetic
  source 1..21: mol_type = other DNA
tgggcaagtcttaaaatttca

SEQ ID NO: 2272 - DNA, 21 bp, synthetic construct
  misc_feature 1..21: note = Synthetic
  source 1..21: mol_type = other DNA
atctttctccataaatccaag

SEQ ID NO: 2273 - DNA, 21 bp, synthetic construct
  misc_feature 1..21: note = Synthetic
  source 1..21: mol_type = other DNA
ggagggacctcatcctcgtcg

SEQ ID NO: 2274 - DNA, 21 bp, synthetic construct
  misc_feature 1..21: note = Synthetic
  source 1..21: mol_type = other DNA
gcaccccctctttgtccttcc

SEQ ID NO: 2275 - DNA, 21 bp, synthetic construct
  misc_feature 1..21: note = Synthetic
  source 1..21: mol_type = other DNA
aagagggggtgccccagccct

SEQ ID NO: 2276 - DNA, 21 bp, synthetic construct
  misc_feature 1..21: note = Synthetic
  source 1..21: mol_type = other DNA
aaatttgtgatacccctcgac

SEQ ID NO: 2277 - DNA, 21 bp, synthetic construct
  misc_feature 1..21: note = Synthetic
  source 1..21: mol_type = other DNA
cgacgaggatgaggtccctcc

SEQ ID NO: 2278 - DNA, 22 bp, synthetic construct
  misc_feature 1..22: note = Synthetic
  source 1..22: mol_type = other DNA
gtaaagtcactagatgtatctg

SEQ ID NO: 2279 - DNA, 22 bp, synthetic construct
  misc_feature 1..22: note = Synthetic
  source 1..22: mol_type = other DNA
gaggacctttggacaaaactaa

SEQ ID NO: 2280 - RNA, 20 nt, synthetic construct
  misc_feature 1..20: note = Synthetic
  source 1..20: mol_type = other RNA
gtaacggcagacttctcctc

SEQ ID NO: 2281 - RNA, 20 nt, synthetic construct
  misc_feature 1..20: note = Synthetic
  source 1..20: mol_type = other RNA
aaggtgaacgtggatgaagt

SEQ ID NO: 2282 - protein, 746 aa, Homo sapiens
MGQTGKKSEKGPVCWRKRVKSEYMRLRQLKRFRRADEVKSMFSSNRQKILERTEILNQEWKQRRIQPVHILTSVSSLRGTRECSVTSDLDFPTQVIPLKTLNAVASVPIMYSWSPLQQNFMVEDETVLHNIPYMGDEVLDQDGTFIEELIKNYDGKVHGDRECGFINDEIFVELVNALGQYNDDDDDDDGDDPEEREEKQKDLEDHRDDKESRPPRKFPSDKIFEAISSMFPDKGTAEELKEKYKELTEQQLPGALPPECTPNIDGPNAKSVQREQSLHSFHTLFCRRCFKYDCFLHPFHATPNTYKRKNTETALDNKPCGPQCYQHLEGAKEFAAALTAERIKTPPKRPGGRRRGRLPNNSSRPSTPTINVLESKDTDSDREAGTETGGENNDKEEEEKKDETSSSSEANSRCQTPIKMKPNIEPPENVEWSGAEASMFRVLIGTYYDNFCAIARLIGTKTCRQVYEFRVKESSIIAPAPAEDVDTPPRKKKRKHRLWAAHCRKIQLKKDGSSNHVYNYQPCDHPRQPCDSSCPCVIAQNFCEKFCQCSSECQNRFPGCRCKAQCNTKQCPCYLAVRECDPDLCLTCGAADHWDSKNVSCKNCSIQRGSKKHLLLAPSDVAGWGIFIKDPVQKNEFISEYCGEIISQDEADRRGKVYDKYMCSFLFNLNNDFVVDATRKGNKIRFANHSVNPNCYAKVMMVNGDHRIGIFAKRAIQTGEELFFDYRYSQADALKYVGIEREMEIP

SEQ ID NO: 2283 - protein, 751 aa, Homo sapiens
MGQTGKKSEKGPVCWRKRVKSEYMRLRQLKRFRRADEVKSMFSSNRQKILERTEILNQEWKQRRIQPVHILTSVSSLRGTRECSVTSDLDFPTQVIPLKTLNAVASVPIMYSWSPLQQNFMVEDETVLHNIPYMGDEVLDQDGTFIEELIKNYDGKVHGDRECGFINDEIFVELVNALGQYNDDDDDDDGDDPEEREEKQKDLEDHRDDKESRPPRKFPSDKIFEAISSMFPDKGTAEELKEKYKELTEQQLPGALPPECTPNIDGPNAKSVQREQSLHSFHTLFCRRCFKYDCFLHRKCNYSFHATPNTYKRKNTETALDNKPCGPQCYQHLEGAKEFAAALTAERIKTPPKRPGGRRRGRLPNNSSRPSTPTINVLESKDTDSDREAGTETGGENNDKEEEEKKDETSSSSEANSRCQTPIKMKPNIEPPENVEWSGAEASMFRVLIGTYYDNFCAIARLIGTKTCRQVYEFRVKESSIIAPAPAEDVDTPPRKKKRKHRLWAAHCRKIQLKKDGSSNHVYNYQPCDHPRQPCDSSCPCVIAQNFCEKFCQCSSECQNRFPGCRCKAQCNTKQCPCYLAVRECDPDLCLTCGAADHWDSKNVSCKNCSIQRGSKKHLLLAPSDVAGWGIFIKDPVQKNEFISEYCGEIISQDEADRRGKVYDKYMCSFLFNLNNDFVVDATRKGNKIRFANHSVNPNCYAKVMMVNGDHRIGIFAKRAIQTGEELFFDYRYSQADALKYVGIEREMEIP

SEQ ID NO: 2284 - protein, 707 aa, Homo sapiens
MGQTGKKSEKGPVCWRKRVKSEYMRLRQLKRFRRADEVKSMFSSNRQKILERTEILNQEWKQRRIQPVHILTSVSSLRGTREVEDETVLHNIPYMGDEVLDQDGTFIEELIKNYDGKVHGDRECGFINDEIFVELVNALGQYNDDDDDDDGDDPEEREEKQKDLEDHRDDKESRPPRKFPSDKIFEAISSMFPDKGTAEELKEKYKELTEQQLPGALPPECTPNIDGPNAKSVQREQSLHSFHTLFCRRCFKYDCFLHPFHATPNTYKRKNTETALDNKPCGPQCYQHLEGAKEFAAALTAERIKTPPKRPGGRRRGRLPNNSSRPSTPTINVLESKDTDSDREAGTETGGENNDKEEEEKKDETSSSSEANSRCQTPIKMKPNIEPPENVEWSGAEASMFRVLIGTYYDNFCAIARLIGTKTCRQVYEFRVKESSIIAPAPAEDVDTPPRKKKRKHRLWAAHCRKIQLKKDGSSNHVYNYQPCDHPRQPCDSSCPCVIAQNFCEKFCQCSSECQNRFPGCRCKAQCNTKQCPCYLAVRECDPDLCLTCGAADHWDSKNVSCKNCSIQRGSKKHLLLAPSDVAGWGIFIKDPVQKNEFISEYCGEIISQDEADRRGKVYDKYMCSFLFNLNNDFVVDATRKGNKIRFANHSVNPNCYAKVMMVNGDHRIGIFAKRAIQTGEELFFDYRYSQADALKYVGIEREMEIP

SEQ ID NO: 2285 - protein, 482 aa, Homo sapiens
MAQTQGTRRKVCYYYDGDVGNYYYGQGHPMKPHRIRMTHNLLLNYGLYRKMEIYRPHKANAEEMTKYHSDDYIKFLRSIRPDNMSEYSKQMQRFNVGEDCPVFDGLFEFCQLSTGGSVASAVKLNKQQTDIAVNWAGGLHHAKKSEASGFCYVNDIVLAILELLKYHQRVLYIDIDIHHGDGVEEAFYTTDRVMTVSFHKYGEYFPGTGDLRDIGAGKGKYYAVNYPLRDGIDDESYEAIFKPVMSKVMEMFQPSAVVLQCGSDSLSGDRLGCFNLTIKGHAKCVEFVKSFNLPMLMLGGGGYTIRNVARCWTYETAVALDTEIPNELPYNDYFEYFGPDFKLHISPSNMTNQNTNEYLEKIKQRLFENLRMLPHAPGVQMQAIPEDAIPEESGDEDEDDPDKRISICSSDKRIACEEEFSDSEEEGEGGRKNSSNFKKAKRVKTEDEKEKDPEEKKEVTEEEKTKEEKPEAKGVKEEVKLA

SEQ ID NO: 2286 - protein, 488 aa, Homo sapiens
MAYSQGGGKKKVCYYYDGDIGNYYYGQGHPMKPHRIRMTHNLLLNYGLYRKMEIYRPHKATAEEMTKYHSDEYIKFLRSIRPDNMSEYSKQMQRFNVGEDCPVFDGLFEFCQLSTGGSVAGAVKLNRQQTDMAVNWAGGLHHAKKSEASGFCYVNDIVLAILELLKYHQRVLYIDIDIHHGDGVEEAFYTTDRVMTVSFHKYGEYFPGTGDLRDIGAGKGKYYAVNFPMRDGIDDESYGQIFKPIISKVMEMYQPSAVVLQCGADSLSGDRLGCFNLTVKGHAKCVEVVKTFNLPLLMLGGGGYTIRNVARCWTYETAVALDCEIPNELPYNDYFEYFGPDFKLHISPSNMTNQNTPEYMEKIKQRLFENLRMLPHAPGVQMQAIPEDAVHEDSGDEDGEDPDKRISIRASDKRIACDEEFSDSEDEGEGGRRNVADHKKGAKKARIEEDKKETEDKKTDVKEEDKSKDNSGEKTDTKGTKSEQLSNP

SEQ ID NO: 2287 - protein, 1064 aa, Homo sapiens
MASESETLNPSARIMTFYPTMEEFRNFSRYIAYIESQGAHRAGLAKVVPPKEWKPRASYDDIDDLVIPAPIQQLVTGQSGLFTQYNIQKKAMTVREFRKIANSDKYCTPRYSEFEELERKYWKNLTFNPPIYGADVNGTLYEKHVDEWNIGRLRTILDLVEKESGITIEGVNTPYLYFGMWKTSFAWHTEDMDLYSINYLHFGEPKSWYSVPPEHGKRLERLAKGFFPGSAQSCEAFLRHKMTLISPLMLKKYGIPFDKVTQEAGEFMITFPYGYHAGFNHGFNCAESTNFATRRWIEYGKQAVLCSCRKDMVKISMDVFVRKFQPERYKLWKAGKDNTVIDHTLPTPEAAEFLKESELPPRAGNEEECPEEDMEGVEDGEEGDLKTSLAKHRIGTKRHRVCLEIPQEVSQSELFPKEDLSSEQYEMTECPAALAPVRPTHSSVRQVEDGLTFPDYSDSTEVKFEELKNVKLEEEDEEEEQAAAALDLSVNPASVGGRLVFSGSKKKSSSSLGSGSSRDSISSDSETSEPLSCRAQGQTGVLTVHSYAKGDGRVTVGEPCTRKKGSAARSFSERELAEVADEYMFSLEENKKSKGRRQPLSKLPRHHPLVLQECVSDDETSEQLTPEEEAEETEAWAKPLSQLWQNRPPNFEAEKEFNETMAQQAPHCAVCMIFQTYHQVEFGGFNQNCGNASDLAPQKQRTKPLIPEMCFTSTGCSTDINLSTPYLEEDGTSILVSCKKCSVRVHASCYGVPPAKASEDWMCSRCSANALEEDCCLCSLRGGALQRANDDRWVHVSCAVAILEARFVNIAERSPVDVSKIPLPRFKLKCIFCKKRRKRTAGCCVQCSHGRCPTAFHVSCAQAAGVMMQPDDWPFVVFITCFRHKIPNLERAKGALQSITAGQKVISKHKNGRFYQCEVVRLTTETFYEVNFDDGSFSDNLYPEDIVSQDCLQFGPPAEGEVVQVRWTDGQVYGAKFVASHPIQMYQVEFEDGSQLVVKRDDVYTLDEELPKRVKSRLSVASDMRFNEIFTEKEVKQEKKRQRVINSRYREDYIEPALYRAIME

SEQ ID NO: 2288 - protein, 481 aa, Homo sapiens
MFSLEENKKSKGRRQPLSKLPRHHPLVLQECVSDDETSEQLTPEEEAEETEAWAKPLSQLWQNRPPNFEAEKEFNETMAQQAPHCAVCMIFQTYHQVEFGGFNQNCGNASDLAPQKQRTKPLIPEMCFTSTGCSTDINLSTPYLEEDGTSILVSCKKCSVRVHASCYGVPPAKASEDWMCSRCSANALEEDCCLCSLRGGALQRANDDRWVHVSCAVAILEARFVNIAERSPVDVSKIPLPRFKLKCIFCKKRRKRTAGCCVQCSHGRCPTAFHVSCAQAAGVMMQPDDWPFVVFITCFRHKIPNLERAKGALQSITAGQKVISKHKNGRFYQCEVVRLTTETFYEVNFDDGSFSDNLYPEDIVSQDCLQFGPPAEGEVVQVRWTDGQVYGAKFVASHPIQMYQVEFEDGSQLVVKRDDVYTLDEELPKRVKSRLSVASDMRFNEIFTEKEVKQEKKRQRVINSRYREDYIEPALYRAIME

SEQ ID NO: 2289 - RNA, 150 nt, synthetic construct
  source 1..150: mol_type = other RNA
  misc_difference 1..150: note = This sequence may encompass 1, 5, 10, 20, 30, 40, 50, 60, 100, or 150 nucleotides
aaaaaaaaaaaaaaaaaaaaaaaaaaaaaaaaaaaaaaaaaaaaaaaaaaaaaaaaaaaaaaaaaaaaaaaaaaaaaaaaaaaaaaaaaaaaaaaaaaaaaaaaaaaaaaaaaaaaaaaaaaaaaaaaaaaaaaaaaaaaaaaaaaaaaa

SEQ ID NO: 2290 - protein, 4 aa, Homo sapiens
  SITE 1: note = misc_feature - Residue is attached to SEQ ID NO: 116 via an N-terminal Ruv-C like domain
  VARIANT 3: note = misc_feature - May be replaced with E, N or Q
TDDY

SEQ ID NO: 2291 - protein, 9 aa, Homo sapiens
  SITE 1: note = Residue is attached to SEQ ID NO: 121 via a HNH-like domain
  VARIANT 3: note = misc_feature - Xaa is selected from G or E
  VARIANT 5: note = misc_feature - Xaa is selected from S or G
  VARIANT 7: note = misc_feature - Xaa is selected from D or N
NRXKXDXVP
